United States Patent Application Publication US 2017/0283862 A1 - sequence listing, part 6

SEQ ID NO: 2 - DNA, 5974109 bp, Klebsiella oxytoca KCTC 1686 (residues 3,982,741-5,974,109 of 5,974,109)
  misc_feature (5617061)..(5617061): n is a, c, g, or t
cgcgcgccgctcgtggaagagctgtaccgcttccgcgaccgcctggcggagaagctgcgctatctggccgatgcgccgcagcaggatccggaaggcaacaaaacgatggtgcgttttagccgcaaaactaagcagcagtacgttgcctcagagaaagacggcaaagccaccggctggtcagctttctatatagatggcaaatggactgaagcaaagaagtaactgctatcatctgataaaagggccgcgccgcggcccttttttgacatcacatgttgttgatatccaagatattactctgttcctcctctctccttataactgccttattattttttgttagtatctatacactgtagatataaatgatatagtggttatagctaatcccttttttattatcttatcgtcttatacatcaccgtcatcaggatacgttgtggcgccaacgcggcgagtcgcagggaggttcgggctagcccgtccaccgccaaatgacctgagcgtaaaatgtattaagcgggtttattttacgtgctatcggatatcagccatgaaactacagcagctccgctatatcgttgaggttgttaaccataatctgaacgtctcctccacggccgaaggcctgtacacctcacagccgggcatcagcaagcaggttcgcatgctggaggatgagctgggaattcagattttcgcccgcagcggcaaacatttgacccaggtcactcccgcaggccaggagatcatacgcatcgctcgcgaggtcctgtcgaaggtcgatgcgatcaaatcggtagcgggtgagcatacctggcctgataaggggtcgctgtacgtagcaactacccacacccaggcccgctacgcgctaccgggcgttatcaaaggctttatcgaacgctatccccgcgtctccttgcacatgcatcaggggtcgccaacgcaaatcgccgaggcggtgtcgaaaggcaatgctgacttcgctatcgcgaccgaagcgcttcatctttatgatgatttggtgatgctgccgtgctaccactggaaccgctccgtggtcgtcacgccagagcatccgctggcgtcgcgagagtcggtatcgattgaggagctggcgcagtatccgctggtgacttacaccttcggcttcaccggccgctccgagctggataccgcctttaatcgcgccggcttaacgccgcgcatcgttttcaccgccaccgacgccgatgtgattaaaacctacgtgcgtctgggccttggggtaggggtaattgccagtatggcggtggatccggtttccgatccggacctggtgaagctggacgccaatggtattttcagccacagcaccacgaaaataggtttccgtcgcagtaccttcttgcgaagctatatgtatgattttattcagcgatttgcgccgcatctgacccgggatgtggtcgataccgccgttgctttgcgctcaaatgaagatattgaagcgatgttcaaagatattaaattaccggaaaaataaccacagaaaaaataatggcatcctctcggggatgccaaagcctataatggcctgaaatggaatatctaaacctcgtctgaatcacaattttcgttaactcctcgtaccacatttgcaaatatacctgccgcgatcaaattaatgatgaaagatatctgctgaaaagcgaattcactggattaataggcaatccataattaagatttatctgtggttagtaattcttagcgattggtggtgaaaaaatgattagtgatatcgattatatgaagtttgcgatgtcacaggaacgtgacaagactgagatagatccagttttgagaagtaaggcctggagcgccgttatccttgggcttgcgatgttctggagcgtcattgctctggttgtctgcaacgtttggttactaagctagagcaccttccagtcacagcggttatgtcagttttatgacaagtgaattattgagaattatttctatctgataaaatagcggtaataaggaggatataatttttccctttttagactcgctcgataaattttctctattggactaatcgccggaataatggcgattagtctttctttgtactcgtgtactaatacgacgcgctcgccgacgcaaacctgacttcttcaatccttctcaatatatccgccctcattattcaaatttcctgtcttaatgcgttacgcctattttagcaatttgagttgttatcaaaatgttacatcaaagatgtgttatctttaataatgaccctgaggaggatcaggggatgctatccctaaggtaaaggaggagctatgtcgtcaaccctacgagcagccagtaaggatacgctccaggttaaagataaaacctggcattactacagcttaccgctggccgctaaacaactgggcgatctctcgcgcttgcccaaatcgctcaaagtgctactggaaaacctgctgcgctggcaggacggcgattccgtgaccgccgaagatattcatgccctggccggatggctgaagcatgcccatgccgacagggagattgcctaccgtccggcgcgcgtcctgatgcaggactttaccggggttcctgccgtggtggacctggcggcgatgcgcgaagcggtcaaacgcctgggcggcgataccgccaaagtgaacccgctttcgcccgtcgacctggtgattgaccactcggtcaccgtagaccgttttggtgacgatgatgcttttgaagagaacgtccggcttgagatggagcgcaaccatgagcgctacgtctttttgcgctgggggcagcaggcattcagccgcttcagcgtagtaccgccgggtaccggtatttgccaccaggtaaacctcgaataccttggccgggcggtgtggagcgaacagcaaaacggcgagtgggtggctttccccgacaccctggtcggcaccgattcccataccacgatgattaacggtttaggcgttctgggctggggcgtcggcggtatcgaagcggaagccgccatgctcggtcagccggtttccatgctgatcccggacgttgttggcttcaagctgagcggcaagctgcgtgaaggcattaccgcgacggacctggtcctgacggtcacccaaatgctgcgtaaacacggcgttgtgggtaagtttgttgaattctacggcgatggcctcgattctctgccgctggcggaccgcgcgacgattgccaatatgtccccggagtatggcgcgacctgcggctttttcccgatcgatgcggtaacgcttgactatatgcgcctgaccggccgcagcgaagagcaggtggcattggtagaagcctatgcgaaagcgcagggcatgtggcgtcagcctggagatgaaccggtattcaccagcacgctggcgctggatatgggaaccgttgaagccagcctggccgggccgaaacgcccgcaggatcgcgtagcgctcggcgatgtgccccaggcctttgccgccagcaccgagctggaagttaatcacgcgcagaaagataaacggccaatcgactacacgctgaacggacagcagtattcgctgcctgacggcgcggtggtgattgccgccattacctcctgtactaacacgtcgaatcccagcgtcctgatggccgccggcttgctggccaaaaaagccgttgagcgggggctgaaaccgcagccgtgggttaaagcgtcgctggctcccgggtcgaaggtcgtttccgactatctggcccacgcaaagctgacgccgtatcttgatgaactgggcttcaatctggtcggctatggctgtaccacctgtatcggtaactccggaccgctgccggacccgatcgagcgcgcaatcaagcagggcgatctgaccgtcggggctgtgctctccggcaaccgcaactttgaaggacgtattcatccgctggtaaaaaccaactggctggcgtcgccgccgctggtggtcgcctacgccctggcggggaatatgaatctcgacctgacccgtgagccgttagggacgggtaaagatggtcagccggtgtatctgaaggatatctggccgagcggaatcgaagtcgcgcaggcggttgagcaagtctcaacggagatgttccgtaaagagtacgccgaagtgtttgaagggacagccgagtggaaggcgattaaagtggatcgctctgatacctacgactggcaggatgattccacctacattcgcctgtcgccgttctttgatgagatgggcgttgagcctaaaccggtagaggatattcacggcgcgcgcattctggccatgttgggcgactcggttaccaccgaccatatctccccggcgggcagcattaaagccgacagccccgcgggccgttatctgcaaaatcacggcgtcgaacgcattgattttaactcctacggctcccgtcgcggcaaccatgaggtgatgatgcgcgggacgtttgccaatattcgtattcgtaacgaaatggtccccggcgtggagggggggatgacccgtcatcttccggatagtcaacctatcgctatttacgatgccgctatgctctacaaagcggagggcacgccgctggcggtgatcgcaggcaaagagtacggttccggctccagccgcgactgggcggctaaaggaccgcgtttgctcggcgtcagggtggtgattgccgagtctttcgagcgtatccaccgctccaacctgattggaatggggatcttaccgctggaattcccgcagggggtgacgcgtaaaacgctgggactgagcggcgaggagcggatagatatcagcaacctgcaggctctgcagcccggtatgacggtgccggtcacgctgacgcgcgcggatggtcggcaggaagtgattgattgccgctgccgcatcgataccgcgactgagctgacctactatcagaacgacggtattttgcactatgtgatccgcaatatgctgtaaacccgcgtctgatataaaaagggccagcacaggctggcccttcatttttcaacggaattacttgctcagcaggtgccccattttggcagccttagtatccagatagtgggcatttttcgggtttcgtcccacgatcagcggcacgcgttccacaatgttaattcccgcttcagtcaggatttcgaccttcttcgggttgttggtcaacaggcgtacctggtcgacgttgagcagcttaaacatatctgcgcacagcgtgaagtcgcgttcatcggcggcaaaacccagctgatggttggcttccacggtgtcatagccttgatcctgtaacgcgtaggcgcggattttgttcagcagaccgatattgcgcccttcctggcggtgatacagcagaatgccgcgcccctcttcggcaatatgcgacaacgccgcttccagttgaaatccgcaatcacagcgcaggctaaaaagggcgtcgcccgttaaacactcagagtgtacgcgagccagaaccggggattgccccgaaatatcgccaaataccagcgcgacgtgatcctgcccggttgccagttcttcaaaacccaccatgagaaaatcgccccatggggttggcagtttggcttctgccacacgtttaagctgcatgtgattctccagattctatcagcacctgactgtgcttctgtttgccgctattttgccacaatggcgcgacgttctcctaattgcgtcgggttacctgcgcgcaaagcgcacaaacgaactactttccgttatgatattgaggttaatgaataaggagatgagatgctgttgattgccagacgaaccgccgttggcgcggccctgttattaatcatgcctgctgcgatctggatttcgggctggaaatggcatcccgggctgtcggcagggacgatgaagctgctgtactgggtgaccgagacggtgacgcagccatggggcatcattacgcacgttatcttatgcgcctggtttctgtggtgcctgcgttttcgtctgcgagcggcgataatgctgttcctcattctggccgcagcgatactggttgggcagggaatgaagacgtggattaaaggccgcgttcaggagcctcgtccctttgtcatctggctggagcagacgcagcaggtgccggtcacgcaattctacgcgttgaaacgcaaagaacgcgctaaactggtgcatgagcagctggcgcaagagcagcaaatccccgaatttttgcgcaagcactggcaaaaagagaccggcttcgctttcccgtctggccatacgatgttcgctgccagctgggcgctgctcggcgttggtttgctgtggccgcggcgtcgctgggtcaccctggcgctgctgctaacgtgggcgacggcggtgatgggcagccgcctggcgctgggcatgcactggccgcaggatctgatcgtcgcaacgctgatttcctggctgctggtgaccctggcgacctggcttgcccaacggttctgcggcccgctatcgccgccgggagaagaggcgcaggatattaaaaaaagggcggcagcgccggaataatgttgatattacccctatcaggccgcatatcctgtactggtgtcatgcatttccatttcaccgctgcggcgaaaatggtactttatagggctgaacgcgggattttttcgcgcaacccacagaacgggaagtcatgtgaaatattttcttattttcttactggtgttagccatcttcgtcatttcagtgacgctgggcgcgcagaatgaccaggtggtcacgttcaactatctcctcgcgcagggtgagttccgtatttcgacgctgctggccgtgctttttgctgccggttttgctatcggctggctgatctgcggtcttttctggctgcgcgttcgcgtctctctggcgcgcgctgagcgtaaaattaagcgtctggagcatcagatcgcgccagccagcgctacgcctgcagaagccggtgttcctgcggtgaaggaataatcatttatgctggagttgttgtttctgcttttgcccgttgccgcagcgtatggctggtacatggggcgcagaagtgcacaacagtccaaacaggacgatgcgagccgtctgtcgcgtgactacgttacaggggtcaacttcctgctgagcaatcagcaggataaagccgtcgatctgttcctcgatatgctgaaagaagataccggcaccgtcgaagcccatctgacgctgggcaacctgttccgctcgcgcggtgaagttgaccgcgctatccgcatccaccagagcttaatggaaagcgcctcgctgacttacgaccagcgcctgctggcggttcagcagctggggcgcgattatatggccgccgggctctacgatcgggcggaggggatgttcaaacagctggtggatgaaacggattttcgcctgagcgccctgcagcagctgctgcaaatttatcaggcaaccagcgactggcagtcggcgatagaagtggccgagcgtctggttaagctggggaaagagaaacatcgcggcgaaatcgccaatttctggtgtgaactggcgctgcagcaaatggcgggcaacgatctggataaggcgatggcgctgctgaaaaaaggcgccgcggcggatcgcaacagcgctcgcgtctccatcatgatgggtcgggtatggatggagaagggcgactatgccaaggcggtagagagcctggagcgggtgattgagcaggataaagaactggtgggtgaaaccctggagatgctgcaaacctgttaccagcagttaggaaaaaccgacgagtgggaagcatttttgcgccgctgcgcggaggaaaataccggcgcgacggccgatctgatgctggcgcagatcctcgaacagcgggaaggggttgacgccgcgcaaaactacgtgactcgccagctggagcgccatccgacgatgcgcgttttccataagctcatcgattaccacattaatgaagccgaagaggggcgtgcgaaggagagcctgggcgtgctgcgccagatggtgggcgagcaggtccgcagcaagccgcgctaccgctgccagaaatgcggctttaccgcccatacgctgtactggcactgtccatcctgccggtcgtggtcaaccattaagcccattcgcggactcgacgggcagtaattttaaaaaaaagccgcactttagttacaacatacttatggattattatgtccgtctcctccggctacggcgattaaggcgtctggcagggagggaaatgcagcctgttattttcggcttatcgcaggtagaatgctgcccgtttaccttttttgcgccgaaccggcgctcatcaacaattaaggtccggtcatgacgtctactgctacatcttcttcccgcgttgtcacatcctctcccatcgtcgttgctctcgattatgataaccgtgataaagcgctggcgtttgtcgaccgtatcgacccgcgcgactgccggctcaaggttggtaaagagatgtttaccctgctggggccgcagtttgttcgcgacctgcaccagcgcggttttgagattttcctcgatctaaaatttcacgatatcccgaataccacggcgcgtgcggtcgccgcagcggcagagcttggcgtctggatggttaacgttcatgcctccggcggcgcgcgtatgatgaccgccgcacgtgaggccctgctgcctttcggaaaagatgcgccgctattaattgcggtaacggtgttaaccagcatggaagccagcgatctgcaggatctgggcattacgctatctccggcggaccacgccgcgaagctggcggcgctgacccagcgctgcgggctggatggcgttgtctgttcggcgcaggaggcggttcgctttaaacaagagctgggccaggcgttcaagctggtgacgcctggcattcgtccgcaaggtagcgacgcgggtgaccagcggcgcattatgacgccggaacaggcgcaggcggcgggggtagattacatggtgattggtcgtccggtaacgcagtctgccgatccggccgccaccctgcgcggtatcaacgcatcgttgaataagggggtatgatgagcgattccaacagtcgtctggtttattcaacggacagcggtcgtattgatgagcccaaagcggtacaggcgcgtccgaaaggggacggtatcgtacgtatccagcgccagaccagcgggcgcaaggggaagggcgtgtgtctgattagcggaatagatgaaagtgacgacgcgctggctaagctggctgccgagctgaaaaagaaatgcggctgcggcggggcggtaaaagatggcgtgattgaaattcagggcgataagcgtgacttgctcaaatcgcttctggaagccaaaggcatgaaggttaagctggctggcggttgattaataataaggccacgataaatatcgtggcctttatttttgtgctggtgtactggtcagcaaatataaactttcattttattgttcgtggttaatattatttacccacctggtggccgataatcccgccgactgccgcgccgccgagggtacccagggtgctgccgtccgttaataccgcaccgcccagtgcaccggcacctgcgccgatagcggtgttacggtcgcgtttagaccagttagaacaagcgctcagagacattgcaacagtgacggccagaaccacagcggccatttttttgttcattgaagtcatcattttttttctcctgaataatctattcatggatacaacttcccttaagcatagcttgttacgccagcccggggggtattccatgaagctttagttgcgcaggtgttgctctattcacgcaggtgatagttacttcctgttatatcgctaacattaattctactttctataaatttttcaggcaggtaaaaagtctgaattcagatgtcagaaaagtctcagaccagggcgatgccggggagagcccggcaaagcggcggtaaggcagaaataaggatcagggatggttaacgatatcgacggctaaaccgcactgggttaactggttgcgcacggcatcattgagattatcatcggtgataatgcggttgaagcgccctatcgggccgagcggatagggatgaaccacgttgaatttcgagctatcgctcagcacaatcgcttcacagcccttttcaagcaccgcgttgaccacgtcagcacgcatcatatcccgtccggtaaatccggtttcagcctgccagccgtcaatgccaataaaggccttgctgaagtggacctgctgaataaactggcgggttagcggacccaccatactttcactgcgcttttgatagatcccgcccagcaggatgacttctccgggcgtctctttcagcagatgcgcgatatagctgctgacggtgatgatagttatatcgccgcgctcggcaagcgtacgggcgagcagggcgttgcagctcccgttttcgataaataccgtttccccggacgaaacgagcgtagcggcccgcgcagccagctctcgcttaatggcgaagttggtcatcatgcgggtttccacatcttcactatccagcggaacggcgaagccgtgggtacgccgcaggtagctctgtttctcgagtgaattcagatcctggcgaatggtgacttcagagacaccggtcatcttcgcgagatcggccacgctcatacggcctttatcgatgaccatttgcaaaatactttgttgtcgggcgttcatagcaacttcgcagttaagggctatttgggcgcgatcggtcctggatggccgatggcgacgatgaagattatcaaatttcccacggcgctttaggctgaccgggtttattttcctgctcgtcgctggaaagcgcctgcagttcagctttcagaatttccagattatggattgcggagtgataatccccggcaaccagaatatccagcacggtatcgattcgttgggcgagcaggcgggcattcagatctgacatggcgttatcctggttacaaatgtgaataaaatcaatgatgctaaaaacggatgaaaaagagaagcgaaaaaaacgcacaaactaactcatctacaatgattcgtgggcaacgcgcagaaaaacaacgggaagggctaaaatgcggctccatataagggagccgcacaggtgaactatcaggcggctggacgcgcaatcacgctacgggtttccatgcgcacttcggcaatcgtgacgtcgataacatccgtgactttgtagacgacttcgcctttgatctgcacggtgccgttttcctggctgcacaccagttcatcgcgcacggcgtgaaggaacggcgccgggataaaggcaaccgcgccgttatcaaccagacgcacgcgcatgccgccgcggctgacatcgataatctcagctgcaaaacgggtagtggtgccggcctgcggattcagatagcgggcgtacagccagtctccaacatcgcgctccgccatgcggttgaggcgacggcgttcagccatttggatcgcaacgtcatcctgcgggcgggagatcgcttcccctttgataatcgctttcagcagacgatggttaatcatatcgccgtacttacggatcggggaagtccaggtcgcataggcctcaaggcccaggccgaagtgcgggcccggctcggtgctgatttccgcaaacgactggaagcgacgaatacggctatcgaggaaaccagacggctgcgcgtccagctcgcgacgcagcttgcagaagccttccagcgtcagcacttccaccgggtcaacgtgcacatcgtgagtcttcagtaaggccgcgagctgctcggtgttggccggatcgaaaccggtatggacgttataaacgccgaaaccgagtttgtcgcgcagcacgcgggcggcacagatgttggcggcaatcattgactcttcaacgatgcggttggcgatacgacgcggttcggcgacgatatccagcacttcacccttgtcgccaagcacaaagcggtaatccgggcggtccttgaataccagcgcgtggtttttacgccattcgctacgacgcaggcaggcctcctgcagcagcttaatttgctgggcgatagtctcgcttcccggctgccagccaccgttattttccagccagtcggaaacatcatcgtaggccagcttcgctttcgactcgatggtcgccgcgaagaactgaatatcatcttcgatggcgccgtcatccgcgaggatcatgcggcaggccagaaccgggcgaacctcgttggggcgcagagagcagaggtcgtccgagagctcgcgcggcagcatcggaatgttgaagcccggcagatagttggtaaaggcgcgaattttcgccgcgttgtccagcttgctgccttcggcaatccacgcggtcggatcggcgatagcgacggtcagatgcagcttgccgtcagcggtttgctcaacgtacagcgcatcgtccatatcttcggtgctggcgctgtcgatggtcacgaaagccagggccgttaaatcacggcgttccagaccttcatcaagcatctcggtcgccacgccgtccggcgcttctttttccagattatgacgcgccagggtgacccaccatggaacgaaatgatcgtcgccgtaggtaatgtactgggtgagctcagcgtagaaaccgcggtcgcctttcagcggatgacggcgcatttcggcaacggcccagtcaccctctttaaaatcatgctctacgccgcgcgcggcgcggcaaggaatggcatctttcagcagcggatggtcaggaacgatggaaagacgatcgtctttcttatgaactttgccgacaaaacgcgtcaggaacggctcaaccagttcttcaggctcagcgctttcgcgttccttttcagtattgaccacggcgataatacgatcgccatgcatcacttttttcatttgcggcggcggaatgaaatagcttttctgcgagtcgacttcgaggaagccaaatcctttttccgtccccttaacgaccccttcaacgcgcggagtctgggaatgcagttgctgtttaagctgcgctagcagcgggttgtcctgaaacataatttcgtattttcgtggctaaaagagcggctgacatttttacgcgaatatgcctgccgcagcaagcgctgtttcagcattttacgtctcctgacgtacattcccgagggcgattttcagccgattcatccaaccgcacagcccgcaccaggcgagtagatcgatagccgcgctacgggaaagcccgtaatcagtgaggggagttagctgggcggcgctgaagcggtcgggcgcacgggtcaaaagctgtacggattgtagaagctggcgttccattgacgggttgtctccccatggctggacgccggattcattaccacgcaaagcgtccgtgagatcggctaaatctggacatcgcgaggcccacgcgttaaagcagctgatgctgccattaatccgcgcagcgatcagcgccacctgcgcggcgaacggttgtcgatcgctgaggtgggtcagaagctgttcctgcagagccagaggaggttcctgagccgccagcagcggggcaagttcaaacaggcccggatgttttcgccagttcgctaaaagagactggcgctcatcgtcggcatagcgtaagtccgcgtcgtcaagtcctggctgccagtcactctccctcgcgacgaaaagcgcttccggggcatcttcctgctgcggcatgccggggatccagcgcaccgggtaacccagcgcggcatggaaggcggcgatagcgcgggcctggaagctgataaagccaataatctgattgataaggataatatcgcgactggtcaggccgacttcgtccagctggctgcgggcgagcgcgttgatcagcgaaggagagctcgcgagctgacgcgcatactgggtaatttgcgccagacgacggttgctctcacgcgaggagtccgggccgggaagcggcgccaggcgagcggcgtagtgattacacaggcgctgtacgccataaacctgggcgacggtcagcgccgtacttagccggtcataggcgctaaatgtctgtagacggttaaccgtcactgacgcgggaaagagggcatctgccagccgacgggcgggcgtaagccagcgcgcatgcgcctcgagcagctcccgggggagagtcagatcgagtagaaaacgatcttcgacatgggcggcttcagggacgagcggcaatacatccaccgggcagattgttgactgggtctcatgataccagtggtttttgccgttaacgcggcgttgctccatgggcgttccttgttcggtatgtggcaaaccgccgtttcgcggtcatgctatgcggaactatcctggcttaaccctggagcgggagaaaatattgatccgtgctaacaaatagcggattggaataacagaaggaaagcgcgggggaaatacccctcctcgcgggcgcgaggagggtaacgaacttatttcagttccagctcgttcatggcggcgatgctgaagccgccgtcaacgtgaacgacttcgccggagatgccggcagacaggtcggagcacaggaatgctgcgctgttgcccacgtcttcagtggtgacggtgcgacggatcggggtgaccgcttcgcagtgcgccagcatcttacggaaatctttaataccggaagccgccagggtacggatcggaccggcagagatggcgttaacgcgaacgccttccgggcccatggcgttcgccatgtagcgcacgttagcttcaagagaggctttcgccagacccatcacgttgtagttcgggatggcgcgctctgcgcccaggtaggagagcgtcagcagggcggagcccgggttcagcataccgcggcaggctttcgccatcgccacaaagctgtaggcgctgatatcgtgagcgattttgaaaccttcacgagtgaccgcgttaacgtagtcgccgtccagctggtctgccggcgcaaagccgatagagtggacgaaaccgtcgaacttcggccacacttttgccagctcggtgaacagagactcgatgctctcatcttccgcgacatcgcacggcaggacgatattagagcccagcgcggcggcaaattcttccacacgacctttcagtttttcgttctgataggtgaacgccagttcagccccttcacggtgcatggcttgcgcgatgccgtaggcgatggacagtttgctggcaaggccagtcaacagaatgcgcttaccggaaagaaaacccatagcttttaatccttatcgttattgcgtatttttactttaacaatcatttggttagcattgttatttcgaaataactcaaatttagccgggaattatatcccactgacgaccccttgtgtcacgatatttttctgccattcgccacgtcatatcgcgctttggctaccgtgtatacaagagtataccatcggatatgacggcgacctggcgctagcgccgtgcaatttacgcctcggtttatttaccgtctttacgccaggcatcggcagtcagcgcctcgccgaaatggccggcaatcaggcgttttgtcagctcgtgcagcggagacgccagaacgtcggcggtgctgccgcgttcgaccacttcgccctgatgcatcaccagcacctgatcgctgatgtgcttcatcatgcccagatgctgagtcacgtaaatgtaggagataccctgtttttcctgcagctccagcatcaggtttatcagctgcgagcgcattgacatatccagcgacgccagcgcttcatcgcagacgatgaccttcggacgcaggatcagcgcgcgcgccaggcccagacgctgtttctgtcccggcgccagcatatgcgggtagtagctgacgtggtccggcagcaggccaaccattcgcaacgtttcgataatctgcttctgccgcgcttcgggttcgaggtcggtattcaggcgcagcggaaaatcgaggatttgcgaaatacgctgccgaggattgagcgaggtcgacggatcctgaaagatcatgcgaatcttctggctgcggaaagagtaatcgccaaacgccagcgggcgatcgtcaatcagcagttcgccggtgctgggttcgaccattccggcgagcatttttgccagcgttgacttgccagagccgttctcgccgataatcgccagcgtctggcgctcgcgcagggtaaagcttaacggcttaaccgcttccaccgtttgccgatgaaaccagccggtgcggtagcgaaaggtcttactcagattgcgcacttcaagcaatgtttcgaccatttcactctttctccatgttcagcgggaaatgacaggcatagaggtggttacgggcgcccaccagccggggcgtttcgatacattcgcgctgggcataggggcagcgcggcccgagccggcagccgatgggcagctgttcgagcaaagggatcgcccccggcaaggtgttgagccgactcttgtgcggcatggcgctgccgaaatcgggaatcgcccgaatcagcgcctgcgtgtaagggtgatgaggaatcgtcaccagctcttcgctcggcgcggtttccaccgtctgcccgcagtacatcacgttgattttgtccgcccatttactgagcatctgcatatcgtggctgatcagcaaaatagtggtgttgttgttttggttcagccgcgtcagcaggcggatgatttgcgcctgcgttgtcggctccatggcgttagtcggctcatcggcgatcagcagccgcggctggttagccagcgcgatggcgatcatgaccttctggcactctccgtccgtcagctcgtaggggaagctgcgcatcgcatctttatgatctttgatcccgacgcggtgcaggagctcgatggcgcgccgcttgcgccagcccaggcgctgccaccagcgtcctttaaaggtccagccggggatattctgcgttaattgctggccgatccgttcggaagggtcgagacaggattgcggctcctgaaaaatcattgagacgttgtggcccaccagcttacgccgctcgcgcaccgacagacgcagcaggtcgatgtcgtcgaagcgcatgcggtcggcggttacccgccagttgtccttggtgacgccgcatatcgctttagctattaagcttttgccggagccggactccccgacgaggccgcgtatttccccctcggcgagtgtcaggctgacgcgatcgacggcttttacccagccttcgttggtcttgaattcaatggttaaattacggatgtcgagtaacggcattattccaccccggcgatgatggcgcggcggatcccgtcgcccagcagattaaccagcaggacgcttatcatgattgccgcacccggcagcatcaccgtccacggcgccacgtaaatcagctccagcgcgtcgccgagcatcgctccccattcgggggaaggcagttgagcgccgagatcgaggaagcccagcgcagcgatatccaggatcgccatcgacagcgcgcgggtgatctcggtgacaaggcctgaggtaatattcggcagcaccgcgaaccataaaatattcagcgtcgaggccccgtcaaggcgggcggcgataacgtactctttttccagttcgtcatgcaccatgctgtagaccgaacgcaccatccgcggcagaagcgccagccagacggcgaacatcgcgtggctgaggtgcggcccggcgaaggcgaccacgataatggccagcagcagggacgggatcgacagcagcgtgtcaagaatatggttcatcaccgccgaccgcaggccgtgggtagaaccggcaatcacgccaagcaccagtcccagcagggcggcgcccagcgtcaccacaaacgcgccgccgaccgtcggcgccgcgccgctcagcaggcggctcaggacgtcgcgaccgagatcgtcggtaccgagaaagaacgacacttcgccgtaccgcgaccaggacggcggcagcagctggtagccgagaaactgctggtcgatgccgtaaggagcgaaccagccgccgaaaacgcacagcagcgccagcgccgcacagccgtacaggccgatcatggcggtcgtatcgccgtagaattttcgccatacggtgcgcagcgcacccggcgggcgcttctccagatagacgctatcgtagggcataccattccttatgtttcagtgggttagccatagcacccagaatatcggatatcacgttcacaataattaccagcgcgccgatgaccatcacgcccgcggaaatcgcggcgtagtcctgttggcgaatcgcgttaatcagccagcggcccagccccggccagctaaagaccatttcggtaatcatcgccagcgttagcatggtggaaaactggagtcccaggcgcgggatcaccggcggcagggcgttgtgcaggacgtggcggtgtaaaatcgtccgccgcgatacgccgcgggtggcggcggctttgacatagttggtgtcgtatacttcgctggtgctgatacgcatcaaacggatcacttccgtcgtcggcgctaccgccagggttagcaccggcagcaccatgtggcgcgccgcgctgacgatcatttcatggcgccacggggagtcggatagccatgcgtcgatcagcgcaaagccggtgaccgatttcacttcatacagcagatcgaagcgcccggagaccggaaaccagcccagggtaagggagaaaaacagggtcagcagcagcgccagccagaagacgggaatcgaaaagcccagcagcgccagggcgctgatcagggtatcttgccatttgttgcgcataatgcccgccagcataccgacggggatcccgatcaccagcgcgaagccgaaggcgaggatacagagctccatggtggcgggaaagacctctttaagctgctcggaaatcagctgaccgttgatgctggaaacgccgaaatcccagtgcagcacgccctcaaaccagaatagccaggcgttccacagcgaggcgccctgcagcggcgcgtggggcgtaaaatagctcaggctaaaaccgacaaaggtcagcaggaagagggtaatcagcagcagcagcaggcgacgcagggtaaaaataatcatggttttttcacctcgtcttctttttcccgcgagacgcctgcgaatgaggcgttgccaaacgggctcagcaccaggcctttcatgtcgtaacgataggcttgcaagcgcagggaggaggccagcggcagcaccggcagttcattggcaagaatgcgctgcgcctctttataggcctcaatgcgcgaggccagctgctgggaagtgagcgccttttgcagcacctcgtcgaattcgcgatgacaccagtgagcatagttggtttgtgaggtaatcgccgcgcagctcaatagcggacggaaaaaactgtccggatcgttactgtccgttgcccagccggacagcgtcaggtcatgactcatatccattaatctggcctcctggaaccggccttcgaccggcacaataatcaccttcacgccaatttgcgccatatccgcctgaataagctcggcggttttcagagggctggggttccaggcctgcgagctggttggcacccacagcttaagcgtgagattttccagccccagggctttcagccgggcgcgggcttccgtggggttatattcggtgatcctggcgtcgttatcgtaggcccaggaggcgcgaggcagcatagacgcggcggtttccgccgtgccgtagtagatcgactgcatcaggcgctgattattgatggccagcgccagcgcatggcgtacctcaggattatcgagcggcggcttagcggtgttaaacgccagccaggcgatgttcattcccgggcgcagggtcaggcgcagacgcgggtcgtcacgcagaatagagagctggcttgcggcgggccaggccagcacgtcgcactcgccggtcagcagttttgacaagcggccggtgccgccggagccgagatcgaccaccacctgcggcatcagcggtttaccgcgccagtaggccggatggcgctgcaggcgaatgtactgaccgctgcgatactcctccagctggaacggaccggtgccgaccggttgccggtcgatcagttcctggcgatcgttctgcgccagcttcgcggcatactctgccgacatcaccgaggcgtagtgggtggccaggtgccacaggaacgaggcgtccgggcgtttgaggcgaaactcgacggtatgactatccagcttacgcacgctttccacgctgtcggcaaactgtaagctatcgaaatagggaaagctgctgccgttaacgttgtgccacgggtggtcgcgattaaaaatgcggccaaaggtgaaaatgacgtcatcggcattaaaattacgggtcggtttgaaccaggcggtggtctgaaaaggcacgttgttgcgcaggtggaagcggtaggttgcgccgttgtccagcacctcccagctttctgccagttcgggaaccaggcgataagtatagggatcgacgtcaagcaaccggtcgtagagctgggcggccagggtatcgacaatcaggccgctgctgaccttttgcgggttgaaggtgttgacctgaccgctcacgcaataaacgaagccgctatcgcgaatatccgcgtgcgcaggcagcgctggcgcggcaaaagcttgcccgtacagcatacataccgctgccaggagagaagacaatttcaggcgcatagtttctttttgattatagagcaaggctctatcttattaatattaaataacatttaccaccaccttattgctcatggagataatataagcgagggctgcgtcggttatttgaccaactgattcaaattcataccgcttattaacttcgagtatacctcgtaaatcatccgacgtttgtcatcaggcaagcgaggggttgagcaaagcgtattttcgattcatctgccgcacggcttgagcaagctatgggtattgagcatggcgcttatttgcgtcgaagccccgatatccgccacatggtatctttttattggcggtttctccagccagccgtggctgtaaggctggctggcggtcgaggcgctacaggggaaggagccggttatagcgggcgatataatctttgggattaatttccagcttttcgccatcgtgatggtgggcaacataagtacgcagtaccaggccgctgttttgcggcgtaattgtccagccctgttgacgatatgcatcttcggttgagcggataagcaggtccgaaaagatcatcatgaccgagagcgccggcgcgcggtggcttttcatggtatggaccaggctgacgtgcgccgcatagcggccgagcgttgaagggttaaccggaatcatctttattttcagtccattgagtcataatgcgctgatgatagttcacatgaagatatcttgctagttacaattttttaaccgcaggtgaacgggctgccgcgcaagcaaaagctatttttcacggcacaggccgcttgcagaaagaagcagggtagtgacgctgtcacttttcaatcgccgagcggcgtgaattcataaagcgccagcgcattgctctccagcgaatcgacaagctgccagcggtcgctatccggcgtctcttcactgacgcgcagcgccggacgcgctctgtgcatcagccagcgatagtcctcatcgtccgggccgctttggctgcgaaaggcctcaaacagcgggaagagcgcgccatggtgccgatcgaacagatgatgtttgattcgccagcgtccttcaaggccgagcaggcgcacgctccagggctgactaaagcgctggataaacgcctcctcgctggaaagccagggattgaaaaccaccgtgttgcgcagcagtagctgataatggccgttatggcgcagcagcagcaagttcttgtcgttgatcaccacctcgccccgcagcctgcgccacagccatagcacccagtagaccggtcgcggcagaccgtggagatagtgcagcgccaggctggaagtgtccagcttgccgttggcgcgggcttccccctgcagccctgaattcagccagaaccccgcgagccaaacctgatccgccagtcccagcagattatccatcagcagcgcgccgcgaaagaaacggccgttggtatcgcgggtatcgccggtgagggtattccacgagagcagccaaagcggcagcaggagctgccgctggcgcagcgcgctatgaagtttgcgcaatttgtgtaccggatagttttcgctggcggccagtttctggctatccacctgcgcgagatccagcagttcattagcatcggcctggcaggccagaaaatccgcctcgaccagcagcggtgaacgcagaaggggatcgttctccacctgttgagggaaacggtgccagatccccagcgccgactgcggcgatagcctctgcaggatcgtcttttgttgccgccaggcgtgctggcgggcctcgtcgctggcctgaggggaccagtgccagacgaagtgccagctggcgagggttgccggcggaaaatggttagcggacagagagaggaaacgttgcagcaggtcgccgcgggtggtgagcccggtatgcagtatcaccgcccagccaagggtcgccagccagctaaaaatgcgctgcaggttataccagcaggcatacccggccatttgcggatcgtcccagccggtgccgaacaggcggctgctgagaaacggatcgtgaatatcgatggcgaatatcggcagcttgtcgtgcagctgttccagttcgcggcggacatcctcgcgcagcaggtcgtccagttcgcgaacggtaatcaccattcgggtgtgacgcagcggcgcggcgcgcgccgggagttcgcgaacatcgagatggcgggtttgttgggggctgagccgcagcggcgggctatccagaccgtaggtttgcggcgcgttgagccgggcgtacagccgatcgattgacaccggctgccatcgctcggtctgctgtgggggcggacggcgagattcgaccgccgtctgcgggtgctgctggcggaactggcgcggcgtcaggccgtgctcgcgtttaaacaggtcgctcatcacccggctgctggcaaagccctgctgctgagcgatctgctgtatcgattgacgcgtcgtcgtcagctgctccgcggcttcgcgcaggcgcagcccggtgatgtactgcataaagctgacgcccacctctttgcggaacagacgcgagagccaggcctcagaaacaaactccgcggcggctatctcctgcagcgacaggcgccgttgatagttggcgtcgattcgcgctaccactctgttaattcgctggctccagcgttcggctccgcgaggcgcctgggcggtgaggggacggctgaagcgtgacgccagcaggagagcaatttcgctaagccagcggttggcctccagccggtagtgggcctgcggattgaccagaccgaggaccagcagctggcgcatcaggtagcgcagggtgtcttcggcatcgcgcgtttcgctgctgctctggtagacggaggcaaaaaaatcgccgtcgaggcgggtcagccatccggcgttcagcgacagcgccatcacgacgttcgccgtcttgctgtgcaggctccagcggcgatgacgattcactatcgccagttcatcggcctgcaggtaccgacccgtctcgccatcgcggagttcgacgctgccctcaagcagccatagcagcgtcagagcatcgttttcctgctggctcagctgccggatatcgcgaaccacaacctgaaagtcgcctgaatgatgctccaccgtcgcctcctgaagacaaaaaacagcacgtcattttttgtcataaccgttttgtatgaaaaacactcattaataatccgtcactataaaacaaaaaagcgcattttaaagccgacagggatgcataaactcgaaagtgtcgtgcaaacacaacacaggaataataaaaatgacacacccgattattgaggcattacaggttaacgaggcgcagtttgtcgcgcttcgccgccgtttccatcagcagccggaaattggttttgaagagcataaaaccagcgaagaggttgcccgcctgctcggcgaatggggctatcaggttcaccgcggtctggcgggcaccggcgtggtcggtactttacgcgtcggcgagggtaaaaaacggttggggctacgggcggatatggacgcgctgccgatgcaggagatgagcggcaaagcgtgggccagccgggtcgacggtcgttttcacggctgcggccacgacggccataccaccacgctattgtacgccgcggaatatctggcgcgcacccggcagtttaacggcaccctgcagcttatttttcagcctgctgaggagttgctctacggcggtcgggtcatgctggaagacggcctgtttgaccagttcccctgcgatgccatttttggcctgcataatatgccggggcagccgttaggcagaatcggcctgcgcgatggggcgatgatggcctcctcggatactctccatattgaagtcaaaggggtgggcggacacggcgcggtaccggagcataccgtcgacgccacgctggttgcctgtcatatcaccctggcgctgcaatccattgtttcccgaaacatcacgccgtttgaaccagcggtcgtgaccgtgggcagtattcaggccgggcacgccccgaacattatcaacgacaaggtgttaatgaagctcacggtgcgcaccttaaacgaacaggttcgcgagaccgtcctgcagcgcattcacgatatcgccgttgctcaggccgagagctttaacgccagcgccgccttatcccacgttaacggcagcccggttttaaggaacgatccggctgccaatgagatggtccgcacggtggcgaccgcgctgtttggcgcggcgcaggtcggcgaggtgaagccgtttatgggcagcgaagattttgcttttatgctcgagcgtaatccgaacggctgctatttcaccatcggggccggggacgaagcggatcgctgcatggtgcataacccgggatacgacttcaacgatgcgctgttgctgaaaggcgccgcgctgtggtgcgccctgacggaacactatttgcgttaatgtccgcaacgaagaggaccctgctatgagttctgtatcgctaagcgaagcgcagttcgtcggcaccgatcgtctgctggcgggtattgtattgagcgttctgaccttctggctgtttgcccagtcggtgattaacgtggttccggcgatgaagagcagcctcgatatttcgctggaaaccctgaccctggcggtgagcctgagcgccttattcagcggctgcttcgtggtcgccagcggcgggctggcggataaattcggccgcatgcgcatgactaccctgggcctgatcctcagcattgtcggtagcgcaatgctggtgttctctcagggacccgcgctgttcctggccgggcgcgttttacaggggctgtcggccgcctgcatcatgccggcgacgctggcgttaattaaaacctggtatgaaggcaaagcgcgccagcgggcggtcagcttctgggtcatcggctcgtggggcggcagcggtctgtgctcgtttgtcggcggggcgatcgccaccggtctgggctggcgctggatctttgttttctccatcgcggtagcgctggcggcgctgtttttgctgcgcggtacgccggaaagccgcagcgccagcgcgcagcagcataagctggatatcagcggcctgctcagcctgatccttgcgctggtgctgctaaatctgtttatcagcaaaggccacggctggggctggaccagcgcaacctcgctggcgatgctggccggcgcgctggcttcggggctgttttttatccgcagcggccagcgtaagggcgacgcggcgctgattgatttcgcgctgtttcgcaaccgggcctacagcgccgcggtgttgtcgaactttatgctcaacggcgctatcggtacgatgatgattgccagcatctggctccagcaggggcatcatctgagcccgctggagagcggaatgatgacgctcggctatctggttaccgtgctggcgatgattcgggtgggcgagaagctgctgcaaagctacggcgcgcgtttgccgatgatgagcggcccggtctttaccgcggtcggtattcttcttatctcctgcacctttctcgataaatcgacctatatcgtcacggtctttttcagcaacgtgctgtttggcttcggcctgggctgctacgccaccccgtcaacggacaccgcggtggttaacgctcctgagaataaggtaggcgtggcctcggggatctataagatgggcagttcgctcggcggagcgatgggcattgcggtgacagcgtcactttttgcgctgtttttaccgctcggcatggccagcgcggcgcagtatgcgctgtggtttaacgccgcgctctgcctgggttcaatggcggtgagcgcgctgctgcttccgcgtacaggtcaaagctgatgttttttcagcagcgcccgcagctggtggtaggttagccccagcagttcggccgcctgcttttgattgtacttcgcctgttcgaggcttctctcgagcaggcttttttcttgctcctgctggaaagcgcgtaaatcgagcggcagcgtggggcctggcgtcttctccacttcgacgggcgtcgccgcgtgctgctggcggaaggggttaataataatattatccagctcgcgctcgctgctgccgtgacggtagaccgagcgttcaaccacgttttttaattcacggatattccccggccagcggtagttctgcagcgtcatggcggcgcgttcgctaaagccgggaaacagcggcagtccgagctcgcggcacatctggatagcaaactgggtggcgagcagcatgatatcgctctggcgctcgcgcagcggcggcagctgcaccacatcaaaggccagacggtcgagaaggtcggcgcgaaaaagtccgtcttccaccatttgcggcaggtcggcgttggtcgcgcaaaccaggcggacgttaacctgtagcggctggctgccgccgacgcgctccagttcgccatattcaatcacgcgcagcagtttttcctgtaccagcatcggcgcggtggccagctcatcgagaaacagggtaccgccgtcggcgcgctcgaagcgccccgggtgacgtttactggcccccgtaaaggcgccggcctcatgaccgaacagctccgaatcgagcagattttcattgagcgccgcgcagttcagggagataaacggcccctgccagcgggaagagaggaagtgcagacggctggcgatcagctccttgccggttccgcgctcgccaatcaccagcactggtttatcgagcggcgccagtcttgagacctgctccagcacctcaagaaagctattggcctcgccgagcaggttgtccttgtaatccgccatgatgaatttcgccatttagtagtgtgattcaccaggtcactttagcaatgcgctggccggataacaaccacttccattaaaatcaataagataaaaacttggcacggcatttgtattagtcatggcacaggccggtgcctgataccagaactatgaggattgaaattatgggtattttttctcgttttgccgacatcgtgaacgccaacattaactctctgctggagaaagcggaagatccgcagaagctggttcggctgatgatccaggagatggaagacacgctggttgaagtccgttcgacctcggcgcgggcgttggctgaaaagaaacagctgagccgtcgtattgaacaggccgttgcccagcaggcggaatggcaggaaaaagccgagctggcgctgcgtaaagagaaagaggatctggcccgtgcggcgctgatcgaaaagcagaagctgaccgaccttatcggcagcctggaaaacgaagcgcagctggttgatgaaacgctggcgcggatgaaaaaagagattggcgagctggaaaacaaactcagcgaaacccgcgcccgtcagcaggcgctgatgctgcgtcatcaggccgcaagctcctcccgcgacgttcgccgtcagctggacagcggtaagattgacgaggcgatggcgcgttttgaatcgtttgaacgccgtatcgatcatatggaagccgaagccgaaagccaccgcttcggtaaagataaatcgctggatcagcagttcgccgatctgaaagcggacgatgaaatcagcgagcagctggcggcgttgaaagccaaaatgaatcaaaataaccagtaatgtcttcgggcggcaccaagacgtgccgccgccatcagcaaggagttcacatgagcatgctttttctcgccatccctttgacgttgtttgtgctgtttgttttgccggtctggctctggctgcattacaacaaccgcaccgccagcggcagcctatcgcagaacgaacagcagcgcctgctgcagctgaccgatgacgcgaagcgcatgcgcgagcgtattcaggcgctggaggcgattcttgacgctgagcatccgaactggagagagaaataatgagcggactggatctgagtaaaaaactgtggcgcattccgcagcagggcatggtgaaaggggtttgcgccggcatcgcgcagtacctggacgtgccggttaagctggtgcgcctgattaccgtactggcaatgatttttggcctgttcctgtttgtggtggtggcctacatcattctctcgtttgcgctggatcctatgccggaaagcgagctgtatggtgaaaaaacgccgagcagcggagagctgttggccgccgcggataaggagctggcagcaggggagcgtcgtctgcgtgaaatggaacgctacgtcacttccgacaccttttcgctacgcagtcgttttcgccagctataactgaaagttgaggttaatgatgaacataaaatggcagcaggccgggcaaaaagtcaaaccgggtctgaaaatcgcaggcaagctggtgctgctcaccgcgctgcgctacggcccggcgggcgtcgcaggctgggcggtaaaatccgtcgcgcgtcggccgctgaaaatgctgctgatgcttgttctggaaccgatgctcagccgggcggcgcagcggttttctaaacgtcgcggatggcgtatgttatgagtgcctaaaaactcactctatcaggatgataaaatgcgaaaactgcttctgggtttagcgctggccatggccttacccgtcttcgcggcggagcactggattgacgtccgcgttccgcagcagtatcaaaaagaacacgtcgacggggcggtgaatattccgctggcggacttaaaaacgcggattgcggctgaagtaccggataaaaacgataccattcacgtctattgcaacgttggccggcaatctggccaggctcagcagatgctgagcgaaatgggctacacgcaggtggtgaatgccggcggcctcagtcagatcgccaggccgaaaagcgccagcaaataatcttcagccccgtcgcagcggggctattgcactttatgattagccctcatgtctatttccctcgttcttcaggctcaacaggatggcgatgaagcgactcaaaacagaatttaatgcgctggtgaatcgtggggttgaccggcatctccgcctggccgtcactggccttagccgcagcggcaagaccgcctttatcaccgcgctggtaaatcaactgctcaatattcacgccggggcgcggctgccgctgctcagcgcagcgcgtgaagaacgcctgctgggcgtcaagcgcgtcccgcagcgggatttcggcattccgcgttttacctatgacgaagggctggcccagctgtacggtcagccgccggtctggccaacgcccacccgcggcgtcagcgaaatccgcctcgctctgcgctatcgctccaacgattcgctgctgcgccattttaaagagacctcgaccctctacctggagattgtcgactatcccggcgagtggctgctggatctgccgatgctggcccaggactatctgacctggtcacggcagatgaccggattactgcaggggcagagggcggagtggtcagcgcgctggcgtcagctatgcgaaggactggatccgctggcgcccgccgatgaaacccgtctggcggagatcgccgcggcgtggaccgactatctgcatacctgtaagcgcgaagggatgcacttcattcagccggggcgctttgtgctgcccggcgaaatggccggcgcgccggcgctgcagtttttcccctggccggacgttgatgccgccggtgaagctaagctggcgcaggcggacaaacagaccaatgccggaatgctgcgcgagcgttttaaatactactgcgagaaagtggttaagggcttctacaaagatcatttcctgcgcttcgatcggcagatcgtgctggtagattgcctgcagccgcttaatagcgggccgcaggcgtttaacgacatgcgtctcgcgctgacgcagctgatgcaaagcttccactacgggcagcgcacgctgtttcgtcgcctgttctcaccggttatcgataagctgctgttcgccgcgaccaaagccgatcacgtcaccgtcgatcagcacagcaatatggtgtcgctgctgcagcagctgattcaggatgcctggcagaacgcggcgtttgaaggcatcagcatggattgtctggggctggcgtcgattcaggcgacgcagagcggccttatcgaggtgaacggcgagaagatccctgcgctgcgggggcatcggctaagcgacggacagccgctgaccgtctatcccggcgaagtgcccgcgcgcctgccgggtcaggccttctgggagcagcagggctttcagtttgaaaactttcgcccgcaggtgatggacgttgataaaccgctgccgcatattcgcctcgacgcggcgctggaatttttgatcggagataaattgcgatgaccgaacctttaaaaccgcgtatcgatttcgatggcccgctggaggtggaaaaggcgcaaattctgaaatccgcgcgcgcttttgacggcgccgatgcggagaagttcgctccagcgcggctcgacgcgccggaagaagaagagggcgcggcggaagcggtggtggaatcggtgctgcgacctaagcgcagcctgtggcgaaagatggtcagcgccgggctggctatttttggcgtcagcgtcgtggcgcagggcgtgcagtggacgatgaccgcctggcaaacgcaggactggatcgcccttggcggctgcgcagccggcgcgctgatcgtcggggcgggcgtcggttcggtggcgaccgaatggcgccggctgtggcgactacgccagcgcgcccacgagcgcgatgaggcgcgggacctgatgcacagccatgcggttggcaaagggcgcgccttttgcgaaaagctggcccagcaggcggggctggatcactcgcacccggcgctgcagcgctggtatgcggcgatccatgaaacgcagaacgatcgtgaagtggtgagcctgtacgcgcagatcgtgcagccggtactggatgcgcaggcgcggcgtgagattagccgttcggcggcggaatcgacgctgatggttgcagtcagcccgctggcgctggtggatatggcgtttatcgcctggcgtaatttacgtctgatcaaccgcatcgccactctgtacggtattgaactgggctactacagccgcctgcgcctgttccgcctggtgctgctgaatatcgcttttgccggcgccagcgagctggtgcgggaagtcgggatggactggatgtcgcaggatctcgcggccaggctatcggcgcgcgcggcgcagggaattggcgccggtctgctgacggcgcggctgggtattaaggcgatggagctgtgccgtccgctgccgtggatcgccgacgataaaccgaggctgggggattttcgccgcgagctgatcggccagctaaaagagacgttgcagaagagcaaaagcggcgcggaaaaataagtcgcttaagcattcccggcttgcggcgtgaacgccttagccgggctaccgtttcacagaaggctgtaacctgtagcccggctacgcgcagcgcaagccggggagaaaagcagaagcgatgatagccgcttatctcatcgtcatttttcctctgagcgcataactttacggcagaaaggccatttttccgccatactgtcaataattgttgacagctatcttcacgccagcaaataactgtcctattattcatcggttattggcctctttagggtgaaaacgcctatgcgtcttgaagtcttttgtgaagaccgtcttggtctgactcgtgaattgctcgatttactggtgctgcgcggtatcgacctgcggggcatcgatattgaccctattggccgaatttatctcaacttcgccgagctggatttcgccagcttcagcagcctgatggcggaaattcgtcgtatcgccggcgtcaccgacgtgcgcaccgtggcgtggatgccgtcagagcgcgaacatctggcgctcagcgcgctgctggtggcgatgcctgagccggtgctgtctctcgacaccaaaggaaaagtcgaactggctaacccggccagctgccagctgtttggccagagtcaggagaagctgcgcagccacccggtcgcgcagctgattaccgattttaacgtccagcgctggctggaaaacagtccgcaggagtcccacgccgagcacgtggtggtcaacgggcagaacttcctgctggagatcactccggtttatctcgaaggcgaacacggcgagaaggtactgaccggcgcggtagcgatgctgcgttcgacggtccgtatggggcgccagctgcaaacgatgaccattcaggacaccagcgcctttagccagatcctcgccgttgggccgaaaatgcgccacgttgtcgagcaggcccgtaagctggccatgctcagcgcgccgctgctgatcgtcggtgataccggtacagggaaagatttgctggcccacgcctgccatctggccagcccgcgcgcggggaaaccttatctggcgctgaactgcggctccatcccggaagacgctgtggagagcgagctgttcggcgacgccgttcagggcaagaaaggcttcttcgagcaggctaacggcggctcggttttgctggatgaaattggcgaaatgtcgccgcgcatgcagaccaagctgctgcgcttccttaacgatggaactttccgccgcgttggtgaagatcatgaagtccacgttgatgtccgggtgatctgcgctacccagaaaaacctggtggagctggtgcaaaaagggctgttccgcgaggacctctactatcgtcttaacgtcctgaccctgtatctgccgccgctgcgcgattgcccgcaggacatcatgccgctgaccgagctgttcgtggcgcgttttgccgatgagcagggcatcccgcggccgaaactctccgctgatttgaacagcgttttgatgcgctacagctggccgggcaacgtgcgccagctcaaaaatgcgatctatcgcgcgctgacgcagctggacggtttcgagctgcgccctcaggatattctgctgccggatcacgacgtctcctcgctggcggtaggcgaagaagcgatggaaggctcgctggatgatattacccgtcgtttcgaacgctcggtgctcacccagctttatcgcagcttccccagcacgcgtaagctggccaagcgtcttggcgtctcgcataccgccatcgccaacaagctgcgtgaatatggcctgagccagaaaaagggcgatgagtaatgcccgtcggccggctgcctgcgccgccggccggcatttccagaaaagggaggggggctggcgtcaaatgaatcggtatatactgcgtttttaccctctttatggcaggcatacgcatgtggatctggcgtagtcatttttttcaatggatgaaactgctggcgctctccagcgcgatctcttttgtgctgttctggtttcaccttcccgccgcgctgctgctggggccgatgattgccggcatcagcctgagcctgcgcggtgcggaaattcgcgtaccccgtcccttttttattgccgcccaggcgattatcggctgcatgattgcccgcagcctgacgccctccattttcggcgttctgctggcaaactgggcgctggtgctgctgattctcttttccacgctcgctatcagcgcgctggcgggatggctgctggtgcgctacagcgatctgcccggcgccaccggggcgtgggggagttcgccgggcggcgcctcggcgatggtgattatggcccaggagtacggcgccgatgtccggctggtcgcgctgattcagtatctgcgggtgctgtttgttgccggcgccgcggcgctggtggtgcgcgtcgcgctcggcggtgaagcgcaggagatgactcagcaggtcgcctggtttccgccgatcagccggcagctgccgcttacgctgctgttgacggcggcggcggggtggcttgggctgcggctgcgctttccttccggggcgatgctcttcccgatgctgattggcgcgctggtgcagggagaaggctggctgctgctcgaacttcccgaatggctgctggcgctggcctatgccgccgtcggctggagcgttggtctaaagtttaataaacagattttcctgctggcgctgaaaaccctgccgcagatcctggcatcgattatcggcctgatcctgctgtgcgcgctgatggcttatgggctgacgcaggttttgccgctggactttatgaccgcctatctggcaaccagtccgggcggactggacacggtggcgattatcgccgccggtacgcgggcggatatgtcgtttattatggcaatgcagacgctgcgcctgttcaccatcttattgaccggcccggcgattgcgcgcttcatctcccgctatgcggcgcggcaataaaaaaagcccccgtttaacgagggcttacgtaactcagcgaggatattacgctttcagcgcggccagggctgcgtcgtagtccggctcttcggtgatttcattcaccagctggctgtaaacaacctggtcattttcatcaatgacgaccacagcacgcgccgccagaccggccagcgggcccgcggagatagcgacgccgtagtcggccaggaactgcgcgccgcgcagggtagacagagtgacaacgttgttcaggccttcagcgccgcagaagcgagactgcgcgaacggcaggtcagcggaaatgcacagcacgacggtgttgtccagttcagacgccagctggttaaatttacgtaccgatgccgcgcaaacgccggtatcgatgcttgggaaaatgttcagcactttacgggagccggcgaactggctcagcgcgacgtcagagagatctttggccaccagcgtaaacggctgcgctttagcgcctgcctgcggaatggtgccttgaacagaaacggggttgccctggaaatgcacggtttgtgacatggttatcttcctgtttacatatagttaacgtcgcggctagtgtatgacatccgtcatcagcacggcaaatccttttaatacttacctgcgaggttcagggaatgcgaaatctgcgagtctatgaagaagcctggccgttacatactccgtttgtgatcgcccgcggcagccgcagcgaggcaaaagtcgtggtggtggagattgaagagaatggcgtcaaggggacaggtgagtgcacgccctatcctcgttacggagagagtatagcctcggtgatggcgcagattatggcgattggcgaacagattgaacgcggcgtctctcgtgagcagattcagcacctgctgccccccggggccgcgcgtaacgccgtggattgcgcgctctgggactgtcaggcgcgcagcgcgggtaagagcatcgcgcagctgttgggcgtgacgctgcccagccgggtggttacggcgcaaacggtggttatcggcacgccggaccagatggcggcgagcgcggcggcgctgtgggaaaaaggggccacgttgctaaaagtaaagctcgacgatcatctgattagcgagcggttgattgccattcgtgaagcggttccgcaggcaacgctcatcgtggatgccaacgaagcctggcgcagcgatggcctggccgagcgctgtcagctgctggcggatatcggcgtggcgatgctggaacagccgcttccggctggggccgatgaagcgctggagaattttatccacccgctgcccatttgcgccgatgagagctgtcatacgcgcgacagcctggcggcgctgcgcggccgctatgagatggtcaatatcaaactggataagaccggcggtctgaccgaagcgctgctattggctgaggaggcggagcgcctgggatttgcgcggatgctgggctgtatgctgtgtacctcaagagccatcagcgcggcgctgccgctggcgccgctggcccgatttgccgacctcgatggcccgacctggctggcggtggacgttgagccggcgctgcatttcagcaccggcgtgcttcatctttgaggatgccagtgcagcaggtccgtcatcgcctgaaggtatttatccgtcgcctcgtcggcggatatcggcgggaattcggcggtgatgcagggcaggccgatatccgcgcaccagctgccaaaggagccgggcgtttcatagccgacgctgcccaccagcggcaggctgaacgccccggcaagccactgccccagcgcgctgtggccggggtcttcaatacaggccagcggatcgtgaaacgagaccacccacgcgggatggatctggtggatcagctggcacagcgcctgggtttccggttctgaaccgggtttttcgccggtgagcagaaccacatcgcgctgttccgccgcgctgttccagcgataaaccgtttcgccttctttccagtttgccgccggaaaattccggttcaggtcgatgccgcgcgcgttggcgcgcagccccagctggcaaccgtccgggttgaccgccagcacgacatgatggcggcgcagctcgggtttgagcgtacgtagcgcgcaggagagggtgacaatcgatgcgttttcatcgccgtgggtaccggcaagtatcaggccgctgcggctatcggccagcggtgcagggaaccacaacagcggtgcgccgaggtgagactggccatagcgttgtgtgccgggcggaaaatcaccgcgctgagggcgaggacgagaaacgggcatagggcatcctgttgtcaggttatttttcagcagtgttgtgtaaaaccgtcccggaatcaaatagtttccagtgaggacgaaatcagcatatatgtcaactttctttcacaagccgtttgcaatttcaggtgatgaaacaaataattatcgcactgccagctctggtttttttattttaaaggggatcttatgaagtatcctgtcacattgacatgcggcgcgctgtggttagccagcgtctcttctcttgcctgggccgccgatgtcccgccgggcaccgtattagccgaaaaacaggtgctggtgcggcacattaaagatgaacccgcctccttagatcccgccaaagccgtcggtctgcctgaaattcaggttatccgcgatctttttgaaggtttagtcaatcaggacgagaaaggcaatctgatcccaggcgtggcgactcgctggcagagcaatgataatcgtgtctggacatttaccctgcgcgataacgcccgctggtccgacggaacgccggtaacggcggaggatttcgtctatagctggcggcggctggttgatcctaaaaccacctccccgtttgcctggtttgctgcgctggccggaatcgccaatgcgcaaaatattattgatggtaaagccgcgccggataccctcggcgtcaccgccgtggacgcgcgtaccttgcgcgtgcagctggataaaccgctgccgtggttcagcaatctgacggcgagctttgctttctatccggtgcagaaggctaacgtggagagcggcgacaactggacgcgtccgggaagcctgattggcaacggcgcgtatgtcttaaaagatcgcgtggtgaatgaaaagctggtggtggttcccaatacgcactactgggataacggcaaaacggtgatccagcaggtcacatttacgcccattaaccaggaatcggcggccaccaaacgttatctggccggcgatatcgatatcaccgagtcgttcccgaaaaatctgtaccagaagctgctgaaggatattccggggcaggtctataccccgccgcagctgggtacttattattacgcgtttaacacgcagaaagggccaaccgccgatgagcgcgtccgcctggcgctcagcatgactatcgatcgccgtctgatggcggagaaaattctgggtaccggcgagaaaccggcctggcgctttaccccggacgtgaccgcaggctttaccccgcagccgacgcaaatcgagagcatgagccaggccgagctgaatgcccaagccaaagcgctgctgcaggcagcgggctacggtccgaaccgtccgctgaagctgacgctgttgtacaacacctcggagaaccaccagaaaatcgcgattgcggtggcttccatgtggaagaaaaatctgggcgtcgacgtgaagctgcaaaatcaggagtggaaaacctatatcgacagccgcaataccggcaacttcgatgtgattcgcgcctcatgggtcggggattacaatgagccgtcgacgttcctgtcgctgctcacctcgacccatagcggtaatatctcccgtttcaacgatccggcctacgacaaaattctgacccaggcggcgctggaaacatcggaaaaggcgcgcaatgacgattacaacgcggcggaaaaaatcattatggcaaaagcgcccatcgcgccgatttatcagtacaccaacgggcgtctgattaaaccgtggctgaaagggtatccgatagccaatccggaggacgtggcctatagccgcacaatgtatatcgtgaagcactgatgcgtactgacctcctgctaacatcagacaaccatcgctaaacccataactggcgcggtttacagcgccagtttctcctttcgcattccgagtatcttcacccaggtcgtttcagctccaaattcccactttccgatgctgttattcgttcaggattaaagcagagcccgtcaactcagtgaacaactttagctcgcgcgcgttgcaggcgtcgcaacgtaatagtactggcaccagcaaccagaggcacgccttgcccggctgttgctaatacaacaggcggtgtgcatcagttggcgcattcgcaacagctcttgcgcaagccaatttattaaagccattgattaacatgaattaaataatgcgcagcctttggcatgattatcgctaacacccatataacaaaattaaaataactcttcgataaatatcgaatatggttatataggaaatggataatgacgcagaaagctgacgaaaatatcaacatattggcgttctctcgccgtaggttgctctcgcagagcaaccttagcggagaaagcgaggaatggccgggcgactatcggcaggcaacgctggcgctgatctccggctggaccggtattgacttcggtcagtatcggccggaccaggtgctgaaatacctgcataccaacgccatccagtcggcggttgaggcgttttccaccgccgacccgaatcgtcaatggacggtggaagcgctggcggactgggtgggcatcggcggctttggcccgctgctcgtcggcagtgcggaaacggtggccgatgaactgcaatcctgggtcgaggaaaccgatgtcgatggcttcaatctggcctacgccgtgacgcatgaaaccttccgcgacgtggtggagctattaataccagagctgcaaacacgcggcgtctttaagcaggattaccgggaaggcacgctgcgtgaaaaactgttcggcgccgggccgcgcctgaccgcgccgcatccgggggcagactaccgtcgcggcgtgcgaaacgatgtcggggcgaaggagacggcggcatgattgatatcgataatctgcataaacgctaccgcacggcggatggccgcgtcagcgaggttctgaagggattatcgctcagggtgcccgccagctccattaccgcggtggtagggccgagcggcgcggggaaatcgaccctggcgcgctgcatcagcctgctggaacgccccgatagcggcagtatcaaggttaacggcaaagatttgtcattactgtcaggggaggcgctgcggcgtgaacggcgcgcgatcggcaccgtttttcaatcctcagcgctgctgaatcgcaaaacggcgtggcaaaacatcgcggtgccgctggagtatctgggcgtggtggaacgcgacattaaggcgcgggtcggtgaactactggagagcgtagggctgagtcacaaagcggaggcctatccgtcccagctttccggcggacagcgtcagcgcattggtatcgctcgcgcgctggcattacgtccgtcggtactgctggcggacgaggccacgtctgggctggatccccaggcgaccgccacggtgctgggtttgctccgacagctacgtgatgagtaccggctggcgatagtcctgattactcatgaaatggatgcggtacgctccgcggcggatgcggtggcggaaatccgcgatggcgcgatagtccagtacgggcaggtgaaagagctgctggcccgtccggattccctgcttggtcagcagctattgccgctgtcgcccatcgctgttaacagcgatctgctgctgcgcctgagttatcgctgggatgtgccggtggcgactgactggatcagccgtctgagccaccagcatgcgctacagatagatttgctaggcggccatgtggaagtgatcaacggtcaactggcggggcgtttacaggtcggcgtccgatttcagggacaacgactgtcagcggatcgaacgatcgcgcttttagcgcagctgggcattgcggcggaaatccttgctcatgcccccgagctacaggaggcggtatgaaaccgacagtgataagccaggatacgccgtggcatgaaatccacacattgctgctgcctgcttatggtgaaacctggctgatggttgccattgtgatgctgtttgtggtgacccttggcggcgtggtgggcgtggtgttattcaacgcctcgccgcgaggattatttccgcgtcccgcgctttaccaggtgcttaactggggcgtcaacatggggcgctctctgccctttctggtgttaatggcggcgattatcccgtttacgttctggcttacgggcaccactatcggcatccctgccgcggtggtaccgatgattgccgctggcgtgccattttttggccgtctggtggaaaacgccctgcgcgaactcccggcggaggttaccgcggtggggctggtgtgcggcggttcgcgctggcagataatccgccacgcgcagctcagcgaggcgctgcctgcgctggtggcggcggtcacgcttaacctggtgtcgatgatcgaatattcggcgattgccggcactatcggtgcgggtgggatcggctatctggcggtcgtgtacggctatcagcgtttcgacaatcacatcatgatcgccaccattgtcgtgctgatcgccacgattcagatcattcaattctttggcgaccgtctggtcaataagcttcgccacactcaggggatttcttcatgacaacagaacagtttgaactccgtaaagcccgccgctggccatggctggcggcgctggcagcgatcgcggcgctggccgtcgcgttctggtggtggcgcggatacgcgcaggcgccgcaggtcgttttcggtacgacgttaaaaattcactacgaaccggcgatggcgggcgagcagcgaattattgagtacatcagtcagcatattgcgcccgattatggcctgaagctggaggcggtgggcgtacaggatccggtacaggcggacagagccgtggcggaggggcagtatgccggcactatctatcaacatcagtggtggcttaagcaggtggtggacgccaacggttttgcgctttcgacgaccgtaccggtttttcagtgggccttcgggatctattccgaccgctataaatcggtacaggatttgcccgtcggggcgaccctcgtcgtgccggatgatggcgctaaccaggggcaggcattatggttgctgcaaaggatagggttaatctcactcgatccggcggttgagccgcgcacggcgaaactgaaaaatattgtcggcaacccgcacaagttcaattttaaagagctggatttattaaccatgccgcgtgcgctgaattcggtggatgccgctattggttatgtttcacaatttgatgccggaaaagtcccgcgggaaaaaggcatattattcccgcctgcgcctaaaacgtttgcctcgcagttagtcatcggtacaccgtatttatcgcaggagaatattgttaaattaaaacaggctttttccgatccgcgtattcagacgtggttaaagaccactgacgatccgctggtcaaagacgtactggttccggtctcagcaaactaaggcatcattgatgaaacgataataaccggacgggcgtttgctcgcccggttactggcgttattatttattaacttattgaatatattgataattatatgattatttattgtttttaatatgctaaagcccggcttataaccagagtcacctgcacaattatataaggtaaataatatgagtactctgtctgttgataatgctggcgccgtttcggcgccggtgagtagcgtcggggatgtggcgcgattaattaattccggcagggagcagagtaaatatgcgcggatgattgtattcctcgcgctcggcggtgtattcctcgacgcttatgatttaaccacgctctcttacggtattgatgatgtggtgcgggaattccagctctcgccgtttttaaccggcattgtcacctcgtcaataatggtcggcacgattatcggtaatttaatcggcggctggctgacggataaatatggccgttattcggtgtttatggccgatatgctattttttgtggtatcggcgattgcggcgggactggcgccgaatgtctgggtattaatcggcgctcggtttctgatggggattggcgtcgggatcgatctcccggtcgccatgtcttatctggccgagttttcccgctttagcgggaagggtaataaggccgcgcggctcgcggcctggtgtccgatgtggtacgccgcctcgacggtctgttttttaatcatctttgggctctatttcctgttgccaaaagaacatctggactggctgtggcgcgcatcgctgctgttcggcgcggttccggcgctgctgattattgccgtgcgcagcaaattcatgaatgaatcgccgttatgggcggccaaccagggcgatttgacctcggctgtgcgtattctgcgcgactcttacgggatcaacgctcacgaagcaccgccagaacgtcctgctccaccgcctaaagtgagctttcgcgtgctatttgcaaaaccgtaccgcgaacgcactattgtcgccggagtgatgaacgtctgtatctcatttgagtatacggcgatcgcctttttcctgccgtccattctcgcccaattccttggcgctggcgtgttcgaaaccatctccgcttcgctgggactcaatgcgctgttcgcctttaccggagggctgctggggatgcacctggcatggaaatacccgtcgcgacacgtcgcgatcgccgggttcgcactgcagtttatcgccctgatcgtcctcgcgctggtggggcagccgcaggccgcgctgggtgtagcgctggcgattgcgatgctggggctgtggctgtttgccgagggctttggtcccggcgcgcagttgatgatctatccggcgctttcatacccaaccgcgattcgcgccaccggggtcggcttcagccgcgcgctttccggtattggcagcgcgctggcgctgtttgtgctgccgctgctgcaggcatcgctcggtacgcaaatgttctgggtcgtatcgctggccgccattatcccaattttcttcctgctcgcggtacgccatgagcctacccaatatgacattgacgacagccaccattgaggaacagaaaatgactttactctctaccggcaccgactatgaacagctggcggcgaccttccgaccgatttttgctcgtatcgcgcagggggcggcggcgcgcgaacaaaaccgcatcctgcccgatgagcagatccgctggctgaaagaggccggatttggcacggtacgcattccgcgggaaaagggcggctggggcgcgtcgttgccgcaattaattgcgctgcttattgagctggctcacgccgactccaacctgccgcaggcgctgcgggcgcatttcgccttcgttgaagaccgcctcaatcaacctgactcgccggcgcgcgatcgctggttccgtcgcttcctcgacggcgagctggtgggcagcggctggaccgaaatcggcgcggtcaggctgggggaggttttcacccgcgtaacgcccgttgaaggcggctggcggctggacggtgagaaattctatagcacaggtacgctgtttgccgactggatagatgttttcgcccggcgcagcgacaaccagggcgatgtgattgcgctggtcagcacgagccaggccggcgttgaacgcgaggatgactgggacggcttcggtcagcgtctgaccggcagcggcacgacccgcttcaaacaggcgcaggtggagcaggatcacgtctacgactttgcgcagcgctttcgttatcagaccgcgttttatcagcatatcctgctggcgacgctggcgggaattggcctggcagttgagcgtgacgtcgccgaaggcgtgaaaaagcggacccggatgtacagccacggcaatgccgccgtgccgcgcgacgatgcgcaggtactccaggttgtgggacaaatcagtagctggagttgggcgacgcgggcggcggtattgcaggcggcggaatcgttgcatcaggcctaccttgcgcatgccagcggcgacgaagcgctcattgaacagcgcaatcgcctggctgaagtcgaagcggcgcaggcgcaggtgattgccagcgactggatcccgcgtgcggccaccgagctgttcaacgccctcggcgcgtcggatacgcgagtgagtaaggccctggatcggcactggcgcaacgcgcgcaccgtggcatcgcacaatccggtgatttataaggcgcgaaatatcggtaactggttggttaacggcgaagcgccaacatttatctggcagattggcgacggcgagaaatcgcagggctgagaaacacggcgaaggagcctctccgtaaggatcgttggcactcccatcacgattgagcgagggagcatcccccggatcatggacgactgggggcagtaatcatgccgggtttggctggctaacaccccagtatattgggtacggataaagtaacggggctacacttccttcatcaacattgtacgtaagggaaaacgacatcagggcagcggtgcgctggagacgctggtgcaggacggcgaccttttcgcagatattgcaatacggtctgactcttaaacaacaaatagctaccgaaaatgcggcaagaaattgccgcatgccactctttaacgtgttaagaagatggctgaggtccaaatccgggactggtccttttgcctggcactgatgaagaacggatgttcccgtttttctgacaggataagttcagaaagtggaatttcgccgctgatatcacgtggaagcggctgttcggtaaccagttcaatatctacctgaagttcggtgcctggaagcgtaaaagtctctttgcctgcaatcagaagcgtttgaccatcaatatccgtttcaaaaaccggcgcccaggcatgtggttgtggcaaaagcggatcgcccactttgatatagctactgatgtccagatgaacgtgtatttttgctccggccagcccaccggtactgacagtaactgtgtcgctgtcaccattggtgtcggtccgcaagccaatctgtgtatgacttttacgccagacggtctgctccgggtgatctgcgcccgagagggaaaacgcattgattggtgtccctgtgacctcaatatgtcccgtccagtaagcaccccgatagcggtccttaatgcgtgcaccccccagacgcacccggaactgatatttagagcgcccaaattccgcgtgcaaatcgcgatgccatacctctctttctccatcgtaaagcgttaccgcttcccagcccgcatcgcctaacagacgataacgcagtacatctgctgaactgaattccgctacatctcccatcagcgcatcgcccgcacgcaactcggcatagcttcgttcacctgttgtggcataggtgtggcgggcacgaagcgctgcagccacaccttttctgtcgaattgttcagcaagtacgccagtcaggcctccacgggatccgaagacggctgtcgcaggcacgccaccaccacatcgcccctgatgttcatcgctgttggcggtcgcgcccagacgatagccccgttcgagcgcctcggcatagacccagtgaaactgcccccaggcggaaccgacttctatcaagcgctccagctccgggtgatgccagtccaggttgcagcgacgcccgccaacatgcgggattaacagatgtttgtgcggttcgcgtgcgtaggccgcataaagttcatcaagtggccatgcacccggtttgatggttccggcagtgaactcattccactcgaatgaacgcaccagccgcccctgattatcaaacgggaactgaggttcatcatcttcaaggaacaccacattatgatcgccaccggcgcaggtattaccgcaccactcggtaccggaatagcagacaaaactgtctggctggttcagcgcattaatcagctttaccgcctgcttccagcgcgcttcagtcacgttaaaatcgttggcggtatagccaagaatatcgagaccggcgacatcacgcccgtagctgaggttatacagcgtgtcgttggtaccaaccgtgtcatcagaatgcacatgaagatcggcatagagcgggcgcagacctgtggcggtttcctccaccgttatccatcctttgccttccagcaagggcagcgcgcccagtgcggcgctgaacgaccattctcctgcgcagagatgcaaattgctgatacgcgcaatcgcccagccctcttcggccagccggaaatcatgatgctgtgtttcacctcccgatgaggtcagcgtcaggcatcctgccagcggcaggctccggcaggtattcccccagcggtcatccagccggacgataacggagaaaggcgtttcaggtgccagtaaccttggcgcgatcgcggcaagagaagcgggctcaccgggcacgatatccagcagcgtatcgccgggcacctcagcaaattttgagctccccagcggatcaacaaacaggcggaagcggaaagctttctcaacgaaactctgtacacgcgtaccgcccccgccatggcgccgatcgcccaggcggataatgattttgtctcccggattgatgtagccatcaataatgtcgatcagaatggctttctggaacggacgctcgtgccccttctgatcaaaacgcaccttcaaatgctggaccgtggcagggctctgtcctggcactagcgggcctgcctgatactcggcgctgacatagttggctgccgagggatcgctggtctgaaacagcgcccagtccgagtaaaatttaaaggcgagcttcagccatgcgccgtcagcaagcccgctggcgcccacggtatataccagttggatctcttcccacgcaccggcagtcaactgagtatgcgagcaggccacactgcccagaaacggccgggctttattctgctcatacaagcccttcggagcgatgtaatcgcctgcatcacggatatcgaactgactcacattaacctcacaattattgggcgcgccagcgctgatagcgctgttcaatgcggcgaaaaacaagattttccattaaccaggcgataagcccgataaggcaaattcccagtagtacctgactgctgttacccgtctgtccgcccatggcaaccatccagcctatgccctgagaggcgccgagcatttccgctgccaccagcgcacgccatgcctggctgaatccgatgcgcagtgcggcggtgataaatggcagggaactgggcagatagacatgaagaagcagttgaaacggtcgagctcccagcgtgcgtgctgcacgcacttcaccgccacggatgccgcggatcccctcctgaatggccagacacatcgggaacagcgcagcgatgacaatcaccaccacgatggaaacgaatcccaggccgaagatcagcagcatcagcggtgcccatgcgatgggcgggatagccataaacaggctgttcagtggcgtaaggaactccctgacgcgatcggaaagtccggcgctgacgccaagaatcagtgccagcagcacggcagtcaaaaagccggtgaattcttccagcaggctggcctgtagctgaccccagatggaaccatcactgaaccagcgtatggcttcccgccatacgtcccagggttgcggcaacacataagagggatagtgactcgcaacgataacccagaccatgagtaacgcgggcagggaagcccagccccagtttggtttgaacttcactgcgttatccctgcttttgtcagccactgcgtatcaacaaattcattcagctctggcgccttttgcatgtagcccagcgtctgtgagtccttcatcagctgctcaaaaaaggcgccatctttcttcgtcagtgacacagaccactcaatacgtttacgggcttcctgaaccagcgcctccggcggcagcgttttaccgtcagcggttttaatggcccgcagcttaaacgcatcggccatgatccgatcggcttctgcaggatgctgattgataaaatccactgctttctgatgcgcacggataagcttcactacatcgtccgggcggtccttcagggtctccggtaacgccatcagtacataccacggataacccggttggactttgtttacatcgagcagcagtctggcgtcgccgcgcagcagtgcttcgctgacaaagggctcccaggtgaaggctgcatccacaacgccctgctgcagcgcagcgggcatgttaccggcgggcatactcaggatctgagcatctttgtcagcaaccagacctgcctgctgttgcagcaccacaccgcgcagcagaacatccattccgctcccttttttgacgccagcgatgcgtttgccttttaggtcagccaaccgggaaatagcactctgtgcgggaacgatcagcgcggcctgtccgctgttcaccttagcgataatttgccccttgagcccgcgcgaaaaccactggaataccggtgtcgcacccatataggctgcatcaagttcatgcgccgccagcgcctgactgatgacgggaccatcaccaaaggatttaagctcgacggtcagcccttcctgctgataaaaaccctctttctcggcgataagtgcaggcgcgttggccagcgcatagacccagccaatacgcagcggctgggaatccgcagcgtcagcagcattgaataaaacccctgatatcagcacagcaagaaatgatttacccatttgattgatgttccgttttgttagagtgagtggttgtcggactgctgcatcacatcggtaatgcgcttcagtaattcattacggtacatggcaaaagccggaagctgtcgcgtctccagattgcttcgcgggcgcggtaaggcgatagacaattcgctgtgtacgccaccgggtgcacgattcagaacgatgacgcggtcagcaagaaacacagcctcttcaatatcgtgggtgatgaagaccgttgtctgcccaatggcggaccagagacgtagtgtctcctcgttcatgtccccacgggtgatggcatcgagcgcagcaaatggttcgtccattaacagaacatccggctccagcgccagcgcgcgagccagtgacacgcgctgctgcatgcccccggacatctggtgcggcaactgatgtgcggcatgtaccaggcccacacgttgcagatatgtcatagcgcgtcggcgctgagaggccacgtcctcgcgcctttgcatccgcaatccgaaccggacattctccagcgcggtcagccagccaaagagctgtggctgctgaaaaacatagccaagccgatggttttccggcgtggtacgctcaccgccaatccgcacggctccccgctctggttctgtgaaaccggccagcagattgagtaacgtgctcttaccgcaccccgaggggcccagcaacaccacaaactctccctggcgggcatgaaaactgaaatggctgaataccgacgcgccgccgggatagcgaaaagtgatattgtctaccgccagtgcgtatggttgagaattggtcatgctgagcgtcatgtataagaaataatgagatgtggttataatacgtattaatacaagttgatctaagatcgcttctgactaaactagatccgaacggaatacgagagacggaacctgaatgacactggtgcgtgaaaacatcacatcgctctaccggcagattgccgataccctgcggcaggaaattgccgccgggcattttcaacctggcggaaaactgcccgctgaagctgcgcttgaacagcgatttgcggtcagcagggtgacggtacggctcgcgctgaagcatctgacagagcaggggattgtcgagcgcaagcagggaaagggaacctacatatcgggcaagaaggttgcacatggcatcaacgtcatgcgtagctttcatgagtcgctaaagcagcaggggctgaatgccacaatgcgtttgctggtcaaagaggaggtgccaacgccagagtcgctgcaatcgctgtttcaaatgtcccggacgctgacgtttatttcacggctgcatctggtggataatgatcccattgcggtgggttacagtcatttccctgcatttcctcatgagctgagctgggaagagaccgagaaggaaccgacctgggtcctgttagaaaaagccacgcaacatcacatcagtcgctccgatattgccatccggctggccttcgcggataagggactcgttgacgtgctgggaaccgataaaaacgcgccgctttttctactggagcgaacatcctggtttgaaaacgggcagtgcgctgagaactctcgctttttcattcgtccggaacgctacgagtttattttgagcaacagctgaagtaggggttctgattctcaccggtgaattaatttgactgggtattcagagtattggcaatccggtcatgaacctcgcgatctggatgatgttcatcattctgttatcagaatatggggtgaatgtcattagcccttaatcttcttcgtaaatcatcgtagctacgattgaatgagcgctgacagggggatacatggattcagcatacgcgtttaagaatttggtttcaggaacgtccctccggaaagtgaaggcatgtttcttgtctggcccacatgcgggtcaacagggcactgttaacatattgtccgtcaggctgttccagagtatctcacttcggcaatccgcgcggccgatactgcacccaccggcgcaatactcagtggaaagtctgcgcaacgggctgaacagtgttagcgtgtgatgctgccaggtcgaaggggaggagtgctgcgctatagctgaatcaggctgggctctcttccccctgatactgcaagcataggggtgatctcattgaattggttgcacaatcagtagatcacaaaacgctatgcttgtctttttcacctgcccatgaatggggattcctcagtgcctcagcggggctttttacttaatctttcaacgaaatccctttcattgtttcccagattctatgcttatcctgctcgtgtaaattcttctgctgcacggcgtgcataaatgcctcctggccctgttccgtcagaggttgcccggactttaatcgtgccgccacactttgcagaatacgatggctaagttggccgatttgcgtccggacatcctgaagcgggcgaggccgccagtcagtttccggcgccgccaaccagtcggcgcgatagcggtactgaatcgccttggcggcgtccatctgcgcctgaataaatggccttacgctctcgccttttaatcccagcgaatcagcatcagcagtggcgctctccagaaccttcttctcttgctgtagatcttcaatcgcctggtgatgttgcgctttatatccggcaacatctttcatcaaggacaaacgttcattgatcaaattgccaatcgaagggggtgaagcagaaattgccgttgcagagaaacttgcggcagcgagaagcaacacggctgtatagagcttgtacggcatcataaatctccgacgtcgataaacaggaagtctgtaaaggcgttcccggtcagttgaagaaacatttcgcagaaagcgtagctagcgcattttacagtcttgtgatgataaaaaaaccgtaaacccgatccgggcttacggttctcttttacagcggggttaaaaattacttcgacacgtccgcaccgaagtatttctgggaaatacgttcgtaggtgccgtcggccttgatctcttccagcgctttatcaatcgccgctttcagctgcgggttgtttttgcgcagcaacacgccggatttctccgcgtcagactgggttgcgacaattttcactggcgcatccggtttatgttttttgaagtcgaggaacgacaggttgtcgttgatggtcgcatcggcacggccctgcaccactaaatccacagattggttaaagccatcggtcggcacaatatccgccccgtatttacgagcgatctgcgcatagttactggtcagcgtgtgggctgattttttgcctttcagatcttcaaaacttttaatgctgcttttgtcattgacgatcagcaccgctttagacgcgatatacggctcggagaagtcgaatttcttctggcgttctggcgtaatgccgacctggttaatcaccacatcgtaacggctcgcatcgacaccggcgatcaggccgtcccatttcccttctacgaactgcgggctcactttcaggcgtttggcgatttcacggccaatctctacgtcaaaaccctccagcgtgccggaagcattgtggaaagtgaacggcggataggtgccttcagtaccgattttcagtacgccagcggactgaatctttgccaaatcatcctgcgccagcgctgcgtgggcaaaaccaagctgcataatcccggcgacgactaatgttgcgagtgctttcatctgcattaccctatgttgtttttattaactcgccccggattacgggagcgcggtgcttaaagaggcgataaactccgcagttcggggtctcttcgcgtgtaaaaacaaatcgttagcggagccggactcaacaatttccccggcttccagaaacaccacctggctggcgatattcgccgccagacgcaaatcatgggtcgccatgatcatggttgttccttccagcgccagctggcgcagcacggccaccacttcgccggagagctcaggatcgagtgcggaagtcggttcatcgcacagcagcaccgccggtgacggcgccagcgcgcgggcaatcgccacgcgctgctgctggccgccagagagcgtattcggcagggcgttgcatttgtgcagcatgccgactttatccagcagttcttcaccacggcggcgggcgcgttcgcgatcccatttatgcaccgtaatcagcccttcggtgatgttgtcgagggcggtcatatgcggaaacagcgcgaagttctgaaacaccatgccggtctggcggctgatgcgacgaatatcctggccttttatccgcgtgtccggcgcgaatgtgatgcgctctttgccgatggtcagctccccgtactgaggaatttccagcaaattaatgcagcgcaataaggtgcttttcccgctgcctgaagggccaatcagcgtggttaccgtgccttcttcaatctttaaattgatgttcttcagcacccggctgccgtcgaaacttttttcaatgctggagagcgttatcattgacctgaccttttactgtcgtacccgctaatttccgctccagcttctcttgcaaatgcgataacaccgaactgaagaacagataaataatcgccgcttcgctgtacagaatcagcggttcataggtcactgccgcaatttgctgcgcggcaagaaacatctccggtacggtgatcaccgacgccagcgaagtgtcttttaccagtgaaataaaggtgttagagagcggcggcacggcgatgcgcgcggcctgcggcagaataatacgacgcagcgactgcgcccatgtcatgctgatggaatgggcagcttcccattgccctttcggcacggccagcagcgttgccctgatcacttctgaggtatacgcaccaatattgacggtaaagccaatcaccgccgcagggaaggcatcaatggttagcccagcgctcggcaacgcgtagaaaatcaaaaatagctgcaccagcagcggtgtaccgcgaatcagccagacgtaaaaccgtatcaccggctttaaaaaggccgggccgtacagacgcaaaagtgccaccgcaaacccgagcgacagcccaagaataaaagagatcagcgttaagggaatggtgaatttcagccccgcggaaagcattggccagaaagaatcaatcgctaagggtaaccatgttggcactgcacaccttccggacatagcatcttgccagaaattgctggcggaatattttattagcccggcttaattatttgggggccggattagtgagaattatattctttgcgccgtgtgcgaaaacaaatatatacgaataacgttatatagaaaaaagctaagccattcttttttgatacaaacccgccgtcgttacctgccgttttattgcatcatttacgtgaaattttgccattaatgcaccatttttgatcgatttggcatgaaatggaaacgtccagacgctgtttctatgaacaaaagtgtttcgttggaaacgtcgctggatcaccaaacggaaaacttttttgcatacggtaaaaatgacggtattggtttttatcagtaagaaaaaactaatataagacatggtgttatgggatgtgtacataacgaagcactgatgggaaccggctgcctgcgaacgtcaggcaaccgctgcaacattttctgaaagccagagagaaaaaccagggcgccggggaatcgttaagctggtggataagttgctgctttcagagggatttttggccgaataccgcctgcgccatctccacgaaccctgcgccgccggggccgagcgttacccagcggggggcaacggggaggtgatccagatactgccggacggtgctgacgcctaccgtgtgtttgaaaaaagcgaacatcggcgcgtcgttggttgaatcgccgctgtagagaatagcttcccgctcccgatcgatatcgacgccgtagtgctgagccagagtacggcgcgtcatggtcagcttgtcgtagccacccagccagcccagcacccacagattgttgacggtagcgtcggcacccgcctgccgcagcgtgttgacgatgcggcgctccagtaccgggtcggcaggccgcgcgaaggccaggctggtcaggcggaagggctgatcgtccgccagacgggcttccggtagcgctgccaggacccggtcggcgatggtccgcagccgggcggcgacggatgccgtggcgtcgtccgcgtgccagtaatgatgctcgatgccatgcccgtccgcggtgcggcggaaaaaaagcccgccgttttcgccaatgacgccgtcaacaggccacatccgcgccatctgatcgcaccagcccgccggcgcggcggtgaccgggatcacccgtatcccggcggactgcaattgttcaagcgaggtataggcggcggccgacaaacggccctgccaggtgagcgtttcatccatatcggtgaggacaaaacgtactggctcgaattcattagcgggagcatcggataaagcgcgcatagggaaccttaaacatcatgatttaataacggaagtgttacgttaattcctcataatcaatagctaaaaatcagttatgctttgcaataaattcgctataaattttccctcattgtccaactgaacggtggcgttaatgactccctttttcaccccgcctcattttcgtaccatcgcgaacgagccgctctggcgaggggggacgcatcgatcgtattcgccgggtgtggttgattgtcgaatgtgttgatttaaaagtatttactctttttagctattcaaagtctatatggttatttgtttttaatgtgggtaatgcataaaagtgaggtgacgcaaaaaagatttatcgatgcgattttaagaaggatattattatgccggaagcgggtgaattgtatctcatgccgaaaagagaaaataactggcatttaaataatgtcgtcgatgaactccgtcgcgttcgtcaggcgtggcgcgatgaacatgcgaaaaataattatcgtaataaacgtagtttaccttcccgggaaagcgttaattcagtcaccgataccttgataaaagtgctttatccgatgcgattaggtgatattgaattacgcaaagagggcgaagattattacgtcggtcatttactaggcacctcgcttgaccgattgactgaagaagcggtcctggaactttattatcagtcagatgagcaggatgcgagtcacacgctgtcgcaggaggcggtcaggcgggttcagcagtttgccaaccgtttgccggtcatccgtcagcgtctcgatcgcgatatcctcgcggcgtatcagggagatccttccgcgcgcagcatggatgaggttctgctctgctatccgggaattcacgccgtgatgcactatcgtcttgcccacgagctgcatcagctcggtctgcctctgctggcgcgaatgatatctgaaaaagcgcacagccagaccggaatagatattcatcccggcgcgcagattgatgacggattctttatcgatcacggaaccggcgtggtgattggtgaaacggccatcgtcggtaaacgcgtgcgtatttaccaggcggttacccttggggccaaacgatttattgccggcgatgacgggcagttgcaaaaaaactatcctcgccatccaatcattgaagatgatgtcgttatttacgccggcgcaacaatattagggcgaattactatcggcgcgcgttccagcattggcggaaatatatggctgacccgtgatgttccgccggatagtcatgtgcagcaggcccgggtacagcaaaaacatttcagcgacggtgacggaatttaattccgccgataataaaatgaaatgaccagcgcatcggaataaataaaataacagcgtgataatcattatgaatttacttgaaacgatcggcgctactccgttaatcacgttaccctcttttgccgccgagctacctggcgtaacgctgctggcaaaagcagagtttatgaaccccagtggctcggtgaaagaccgcgcggcgaaagcgatggtgctggacgggattgctcgagggttattaacgccgggtaaaacgattattgatgcgaccagcggtaataccggcattgcctacgcgatgattggcgcggcgctgggatatcacgtccggctatatctgccgcagaataccagcccggagcgcaaacgtattattcgtcattatggcgccacgattgtggagaccgatccgctggaaggttctgacggcgcctatattgaagttcaggcacaagttgctgcgcatccggaacgttatttttatccggaccaatataacaaccccgtcaatccgaatacgcatttcgcaacgaccggaaaagagatttgggagcagagcgggcaacagatcacccattttgttgccggtatgggcacctccggcagcttcgtcggcaccgcgcggcggcttaaatatgaaaatccgcgcgtgaaaacgctcgccgtacagcccgcttcgccattccacggcattgaagggaccaagcatatggggagcagcattaaacctggcattctcgacgaaaccctgttcgacgacgttattcccgtcaccaccgaggaggcttatgcgagcacgcggcgcctcgcccggcgggacggcatttttgtcggcatttcctctggcgctaatgtcgccgccgccgcgcggctggcccgcacgctgccggcgggatcggtggtggtcacgctgctgtgtgatgtcggctcgcgttatctgactgacgctttctggaatgaaacccatgattgaattaactcaagaaatcaccaggctgattggcgctgaaggggaaaaggcctatcccaacgaatgctgcggtgcgctctttggccacttttacgcgcagggcgatgcccgcgtgacggcgattttccccattgttaatgctcgcgagtcggaggagcagtaccaccgttttgtcatcaccgccgatgactccctgcgggcggaacgcgctgcgctggctcaggatgtggacgtgatcggctattaccattcgcaccccgatcacccggccattccatctgaatttgatcgcgaacatgcgctgccgttttacgcctatatcatcgtggcggtcgcgcagcgcgaggcgggggcactgaccagctggcggctgacccaggaccgccagcgctttttgcaggaggacgtgcagatcgttttataacgtgaataacgggcacaacgttgccggaaaccagaacaaaacgcggagagattaccactatggcatcgacattactgattcccactgcgctacgcgccttcaccgacggtcaggggaaagtgatcctcgaaggccacaccgttgggcagctggtcgcagcgctggcggagcgatttcctgacattcagccgcatctgtatgacgatacgggcgcgctgcgcagtttcatcaatctttacgtgggagagaacaacattaaaaccaccggcgggctggagactccggttagcgatggggcggaagtgctgctggttcccgccattgccggcggcgtcgggaaggcgatatgagcagaccgagcattatcccgggtgaccgtctgacggagctgacgcatgcggaaattgcccgctacagccgccacctgctgctgccggaagtcgggcttgaggggcaaaagcggctgaaggctgcccgcgtattgcttatcggcaccggcgggttgggggcgccggtggcgctttatctggctgcggcgggggtcggtaagctggggattgtcgattttgattttgtcgacgtctccaacctgcaaaggcagatcattcacaacaccaaagatatcaaccgacccaaagtggcttcggcgaaagacaagattaaagccatcaaccccgagatacaggtggtgacctataacaccaccctgagcagcaaaaacgcgctcgaaattattggggaatatgacctcgtcgtcgacggtacggataattatcccacccgttatctgatcaacgacgcctgcgttttgctgggtaaaccgctggtctatggctccattttccagttcgaagggcaggccagcgtcttttatgccggggaaggcccgtgctaccggtgtctttatcccgagcccccgccgccggggctggtaccttcctgtgccgaaggcggcgttgtcggcgtgctgccggggattatcggcaccattcaggcggcggaagcgatcaaactaatcgtcggcggcagcgagagcctgattggccgcctgttgctcttcgatgtgtggcagatgaagcaacgcgagctgcggctggagagggctcccgactgcccggtatgcggtgagcatccctcgattcatgcgctcatcgactacgaggagttttgcgggctgaaacctgatgaagcagaagttccggttgaaagcgtcacggcgcttgagcttcacgcctggatagaggagggaagacccctgcagctgatcgacattcgtgaaccccacgaaagggcgattgcaaaatttccgcaggcaaaagtgatgccgctgggccagatagtcagacgtatcggtgaattcgacccgacggtcgatgcggtatttctgtgcaagatagggcagcgcagtattttcgccattcgggcactccagcgcgcaggttatcaggggcgcgtgatgaatttaaaagatggcctaaacgcctgggcacgggatgtcgatacccgtttgccgcagtactaaccttcagctccactctttcaaacactaaggaatcattatggcagaacaaaaaggcattaatgcactggggcgtgaagccgcgtatcagttagcgaacgtgaccaaaacggcaccgcaatttgcggcaatcaccccgcgctgggtcagccgttttctcgattataagggcctggaatcgggaatttaccgggtgaacaaggtcgtggagggggagacgccgctggatgtattatgcagccaggatccgtcgcgcgttgaaataccccagggctatatcgagtatcagaccacgccgcgtgaataccagctggattcgattacgaccattataaacgtcgataccaaaatcgccgatctctacagctcgccctacgaccaggcctcagagcaaatcgcgctggcgattgaaagcctgcgcgagcgccaggaaagtcagctgatcaataacgatgaatatggattgctgaaaaatatcgacgactcgcagcgtattcagacccgcaatggccgtccaacgccggatgacctggatgagctgttgtccaaagtctggaaggagccctccttctttctggcccatccgcgcgcgattgccgcatttcagcgtgaggctacgcgacgcggcgtgccgccggtcaccgtgaatttgcatgggggcacgtttatcctgtggcgcggtattccgctgatcccttccgacaagctgtttgtcgatggtctgaaaaacccgaaaggccagggcggaaaaaccaatatcctgttgattcgttccggtgaaagcaaacgcggcgtgctgggtctttatcaggaagggctgccaaacgaacagtctcgcggtttgtcggtgcgcttccgggggatcgacgataacggcgtggcttcctatttactctcactttattgctccgctgcgatcctggccgatgacgccattgccgtgctggaggatgttgaagtgggtgaatattatgactacgagtaatttattcacgcttccctatgcgcccggcggatgggcgggcgacgcgccctccgcgcgtgattatggtctgcccgatgcgcgcgatctgcaggggctacctgacgacgcgcccgcacgcccgcgtgcgaccgaagccgcttacgcgccgcgggtgctgccattgggccaggagagcagggcggatattgcgcctcgcggattcgcgccgttacccccttccagcgtaaaaacggcgccgccggcgcgggttggacagatcccggtagaacgtatccgcgctgatttcccgatccttagcgaacaggtggacggacatccgctggtgtggctggataatgccgcgacgacccagcgcccgaagcaggttatcgatcgtatcagccactattatttacatgagaattcgaacgttcatcgggcggcgcatacgcttgccgctcgttccaccgatgcttatgaagccgcgcgtgagaaagtgtcgcgttttatcggcgcccgcggcccggaaaatatcatcttcgtgcgcggaaccacggaagggctcaatctgatagcgcacagctacgtgaagccgctattacgaccgggggatgaaattatcctgacgttgcttgagcatcacgccaatattgtaccgtggcagcttattgcccaggaaacgggcgcgacgatccgcgttgcgccggttgatgagcacggtcagctgatcgttgaggaatatatccggttgttcaacgataagacccgctttgtctccgcgacccacgtttctaacgcgctgggtaccgtcacgccggttcaggagctggtgcagatcgcccatcgttttggggtgcgcattgccatcgacggcgcgcagtctatttcgcatatcccgaccaacgtgacggcgctggatgccgatttcttcgtcttctccggccataaaatttttgggccgaccgggatcggcgtggtctatggcaagcaggaggtgctggaagaggcgcgtccttatcagggcggcgggaacatgattgccgacgtgacctttgaactgacgcgctatcagccctcgccgaataagtttgaggcggggacgggcaatattgctgatgccgtcgggctgggggcggctatcgattatgtcacctcgctggggatagaaaacattgcgcagtacgagcacgccttactggagtatggcatcgagaagctgtcggctattccgggcctgacgctggtcggtaccgcggcgaacaaaaccagcgtcttatctttcgtgctggcgggtcatgaaaatgcagccgtggggcgctatctcagtcaggtcggcattgccgtacgatccggacatcactgcgcgcaaccgatcctgcgccactttggttatgagagtaccgtccggccttcgctggctttttataatacgccgcaggaaattgattttctcgcagagcatgttgcaaggtttgcttcgcggtagcggtgtcaagcacgccagggatggaccatgacgacaatcccacaagcccgctgatttccccgcgggcttttatcatatcgtggtaaggataaggcgtgttgccgcgacttcggcaacacggcgagccagcctgaaaggcgccagcggacgttttaatggggggcgcagtagctgcctgaatgaatgtggggttaacgctgcatcccccagcgcttaattgtgatcttttccagactggcgaatacgatgccttccaccagcagaccaatcgcgatgaccgttaacagccctgcaaatacccggtcggtgaacagctcattgcgattctggaatatataccagcccagacccccttcgccgctggaggcgccaaataccagttcggcggcaatcagcgttcgccaggcgaaagcccagcctattttcaaaccggaaaggatggcgggcaacgatgccggaataagaatcgtgatcacatagcgtggccctcggaggccatagttgcgcccggccatgcgcagcgtttccggcacgctgctaaatccggaccaggtattcagagcgatgggccacatgacggaatgtatcagtacaaatatcaggctggcatttcccaggccaaaccacagcagagccagcggcagcagcgcaattgccggcagtggattgagcatcgcggttaatgtgctgagcagatcgcgaccaaactgcgtggttactgccagggcgctggcaatcagcgccagcgcgctgccggccagatatcctttcagcagggtactgagtgaattgacgattttttccggcagttcgccattgcgcaggtcttcactgaacgcctgcagcgtctgaaataccccgggcagcatcagatcgttttgctgtattcgcgcggcgatctcccatagcgccagcaccagggcgacaatcacagacttacgcagccatgcctgattccacaggcgctggcttaagggtagcggcgtttccaccggcagattacgtagcggcggtaattcgcgttcgaattcaggacggatgtacggtggctgggacatacgctggctcctcgccggatgagtgagacggaccgttgccggtcgtcgggaataacagatggtgaatatgacgagccgcgtgttgaaacgcctcgctgccgaaatcattaagcgtgaactgatgacaattaagctctgcccggacgcgccctggatgcggcgaaagcaccagaatacggctgcctacgaccagcgcctcttcaatcgagtgggtgacgaaaagcagcgtaaagcgctcttcttcccagagcgtcagcaactcttcctgcatcgtgcgccgcgtcagcgcatccagggcggcgaagggttcgtccatcagcaggatgcgcggtttcatcgccagcgcacgggcgatggcgacgcgctgcttcatgccgccggagagcgtatggggcatcgcgtcagcaaattccgccagaccgactttgtgaaggaaatgcagcgccgtctcttttgcctgtgagcggctggctttgcggctggcgagcagaggaaacatgacgttttccagcaccgttttccacggcggcagctggtcgaactcctggaataccatcatgcggtccggagcgggggcgctaactggcgtccctgcaagcgaaatttgaccgctgcgcggggcaataaaaccgcctgcggctttcaacaggctcgattttccgcagcctgaggggccaagcagaataaagcggtccccaggccagacatcaaaactgacatcgtgcgtcgcgcgtacccggcgttcacgcgtgcggtattcaatatcgacatggctgacctgcagcagcgggccatcaatttgctgattgaccatcatagcctccagtatcgcggtttagctgccggggttttcccatgcttcgttaaaaaaataatctttccacgagccggccttatttttcagtatcccaagctcatggagtttttcggcatatacgccagtacgttcaggggaaaccgtaaagcttatttcgggatcgttaacaattttttgtaccagcggtaaaggcagccgcgatttctcaacgcgaatgtaagtttcggcagcggcatttttgtcacggttaataatacttgcggcttcgctgagcgcgcgataaaacgctttataggttctggggttttcatcatggaatttctgggtggtatagagaacattaaaggttgcctgtccccccagtacgtcataggagctgagcactttatgcacgtttttatgttccagcgcctgatactggaagggcgggcttgagaagtgggtggtaatctccgatccgccggcaattaatgccgcgctggcgtccggatgcggtaaactgacgctaattttatcgaagcgtttgaagtccccgtcaccatataatttcgcggtctcgatttgtaatgtccgagactgaaaaccgacgcctgctgccggtacggcgatccgatcttttgcggatagatctttaatgctttttaccgccggattattactcaacaaataattgggcatcgaccccagcgaggcaatcgctttcacattttgcttacctttggtgcgatcccatagggtgagtacgggaggaaccccggctgacgcaacgtccagagcgccagagagcagggcctcattcatcccggtcactccggaaatggtgcgccactctacttttatatccagcccctctttctgaccctctttttcgataagccgttggtcacgtaccacatcaagaattaaatagccgatgccaaattgctgcgcaatactaatgtttccttccgctaatgccggctggcttatcccgcccagggcggaaagcgccagcgtacaggcgagtattctgcttgttttattcatttcagtttcccagaaaggtgtttctcagccaaaaatcatgggcagaggcgagcgggaaaggaagtgatttaaatgaaaatgaatatcagagaaatgaataacgatatttgtggcttgttatttaccaggcggaaaagcttagtcattattcatgtttaggtcataaatatattctcagtatagtcgggttcatcttttaaatagcccttatcaatgtaggggcagtcattgcgagcctcatcatgcctttattttcggatcattatttacgttcgcttttgcagcgccatctggtaagggttggcaccggacctgatatcgctcaaaaggtcgcggataacctggtcgaagcctcactaaaaggccacgactctcatggcgtgaccctgttaccgcgctatattcgggccattctggcaggggatttgaaccctggcgccacgctcaccatgttgtctgatgccggaccgatcgtctcttttgatggggggcacggcttcggccaggcgttaggcgaacaggccatggccgtgggtattgagcgtgcgcgcgagtttggggtggcaataatcggattgtctaatacccaccatcttggacgaatcggcgcatgggcggaacaggcggcggacgccggactggtctcgctccattttgccaacgtggccgcgccgtcggtcgtactgcctttcgatggactcggtgcccgactcggcacaaatcctttttgtgtcggggtaccgctcgcgaaccggcccccggttatccttgacttcgcaaccagcgccatagcaggcaataaagcgcgcatcgcatggaatgaagggcgagccatccctgaaggatgtgcggtagatgcgaacggacaacccaccaccgaccctgcggtattaatgacggaaccgttcggtgccttgctgccttttggcgggcataaaggcgcaggattgtcgctgatttgtagtctactcggcgctgcgctgaccggcggcgaaaccgaaagccagcaaattccgccacgtgccggaatcatcaacaatatgctgtcgattttatttgatcctgcgcgactgggggtgcaggagagttaccagcaggcgctattagcgcaggtggactgggtgcgtagcgggcaggaagggcgcaatgtgcagatccccggagagccggaattgcgcgcgtatacccgccgtcagcaagagggtatctggatcgatgaggtgagctggcaggcgtttgtcgccctggaagcattaaatacctgaggttgtctgcctggttaaatacgtctttgggttatctgttcgaagcgttggtattatgtccggttaattagtgctgatgaacaaaataaataaaagcactattttatctttttttctcataaccatagctgaaaaacttggtaagtcatcagtgagaaaataaatatagtcatacttaatattgtatgaaccttttatcctcgcggccaaattttaatttgctgcatagtcattttttacaggagttattatgcatctggcgcgtttcccccggcttcattttggccacttcccgacccctctggagcctctcacgcagctttcacgcttgctggaggggccaaatatctggataaaacgagacgattgcacaggcctcgccactggcggcaataaaacccgcaaacttgagtttttgctgggcgatgcccaggcaaaacaggcggatattatcattacccagggcgccacgcagtctaaccatgtgcgtcagaccgtcgcggcggcagccagactgggtctggaaacgcatatttttctcgaacaacgcgtcacgacgctgggtgatgagtatcagcaatccggcaatgtgctgctggacggtttactcggcggcaaaattatcgctcatcttcccggcggtacggatatgcagcaggcaatggaacaacacgcggaaagcctgcgagccaggggccacaccccttatgtcatccccggtggaggctcgaacgctatcggcgcgctgggctacgtctcctgcgcggaagaactgctttggcagtccagccagctacggctgcgcatcgatcatatcgttcatgccaccggtagcgcaggtacacaggctggcctgattgcgggcttaactgccacgcacagcggtattcctctcctcgggattagcgtccgcgctccgcgcgaaaaacaggagcacaacgtctggcgtctggcgcagcagacgcgggaactgctcggtgtaccgggtgaattgccgcgtgaggcggtggtggcgaacagtgattatgtcggcgaaggctatggcttgcccaccgaagggatgcttgaggcgctgcagttgctggcgcagcacgaggggattctgctcgaccccgtctattccggaaaaggcatggccggattgattgatctgatccgtaaaggtcatttccgcagggatgagaatgtggtgtttatccatacggggggaagtgcaggtctgtttggctaccgtcaggtcatcgccgattatttgccatcatgagtacaccatttctgctgggaattcttggcggcatggggccgctggcgacgctggatctgatgcataaattgctgcgggcaacgcccgccagcagcgaccaacagcaaattccccatgtggtatggaatgtgccgcaaattgcggatcgccagcgggcgctggcgggaacggggccatccccgctgccgcagttgttgtacggtgtggaacagctgaaccgcgtgggcgtcagtcatattgccattgcctgtaatacggcgcaccactggtatgaggcgctggcgcagcatagcgacgcaccgttgctgcatattgtggatgccacgctggcggtattcgacgggaaagagaaaccccggcgggtcgggattatcgctacccagggcacgctggatgccggttggtttcagcacggattcaccgcgatggggatcgaaagcgtacagccaacgcaagaagaactgcggcagtggtttgtaccgggatgctatgcggtaaaacgcggcgaactgcgtaccggcggagaactgctgagtctacaggcccaggcattgcgcgatcgtggcgcagagcggctggtgctggcctgtacagaagtgccggttgcgctggctgaggtgacctcaccgcatctggccgtgtcaattgatcccgcagaagcgctcgcccggcagtgtgcccggctatggctggcgcaacgcgagacatggcattaaaaacgttgttatttaaaggataaattaaatgaataaaagtctctgtgtcttacttgcagcgggtggcctgtgggttaatagcagctttgccgaaacgccagcggaagttcgggtggcatatagcggcggttctcaggtgctgatgctggctaaggccgatggttctttggataaggcactcaacagcaaggtgaaatgggtgcaatttgcgtccggtgctgatgcgttaaattactttgccagcaatgcgattgatattgctaattttggatccagcccggcaacggcaggcattgtcagaaaactgccggtggaaattatcggcgtctctggcgtgattgccagctacgagcgtttaattggtaaagacggtattgccagcattaaagatattgagggtaaacgcgtagcctatccgccaaactcgacggcgcaatatgcgcttgaggccgctatcagcgttaaccatctcgaccgcagtaaaataacattattgccgctgcgtccggcggaaatggtcgcagcctggaaacgcggtgatatcgacgcgggctatgtctgggcgccgtttgctcaggaactggagacttctggcgggcatcaggtgttcgcaaccaaagatctgcaaaaagatggttacctgatttataacaactacgttgtgcgtaaagcttttgctgagcagtacccgcaaaccgtcagcgcgttcctgcgtgttcatcagcaaaaagtcgatgagtttaagaaagacccggagcgcgcggcggccattgttgcgaaagaggtgggtgcgccggtgacgaccgccgtcaatacgttgggtgggctggaatatcccacgctgagccagcagggtacggcgcaatggttgggtaacggtacgcaaaccaccgacagcgggattgggaaagcgctgaccaaaacctctcacttccttgctgatatcggtgagattcgccaacgtgatatcccggccagctgggacagcgccattaactcccgttatatccgtgacgcagcggtagccgcgcaatgagattgagttatcacattgccatcagcgtcgtttcggtcactgttttctttatcgtctggcaggtggcggcctcgcggcaatgggttgatccgctgctgctgccatcgctaacggatataggcctgacgaccgaagagttgctggcggatggttatcgtcaggtgccgctgtgggagcatgttgccgtcagcctggcacgtgcgttaagcgctttttctgtggcaatcatcatcggtattcctctgggattattgatggggctgtcggaaggtctggcggcggtgctgaatccgtttgtgcagtttttgcgcccgctgcccaaaattgcccttattccgctggcggtcgtctggctggggattggtgaggcctcgaagttctttctcatctttattgccactttccttagcgtggtagtgggggcatctgctgcggtagagcgtattggtcgttcgcgcattcgtgtggcgcaaacgcttggtgcttcacgcaaacagatctttctgcgcgtggtgttaccggatacgttaccggaactgttcaccaccgtcaggctgtcgattggcattggctggacgtcgcttatcgcggcggagatggttgctgccagttcggggctgggttggatggtcattaacgccagttcctatttacgcaccgatatcgtcatgcttggcattttgctactgggtggcattggctatgcgctggatttactgctgctggggctgcagcgcctgtttgtaccctgggcggggaaagaataatgagtgctatcacgctggaaaacgtatcgctcgcctttgcggcgaagccacagccgttcacggtgctggaagatatcagcctgtcgctccacaaaggggaatttgtggtgctcctggggccttccggctgcggtaagtccactattcttaacctggtcgccgggtttaacaaaccggatcgggggcgcgtggtggcgggggggaaaccggtccgccagccggggccggatcgcggaatgatcttccagcagcctaacctctttccgtggctatcggtactggataacgtcacctttggtcctcggctgggtaagcatcgcaaagatgaaattaacgcccgtgcgatggaatggcttggactcgttggcctgcaaggctttgagcaccattcgccctggcagctttcaggcggtatgaaacagcgggtagcgctggcgcgcgcctggctacccggcccggatgtgctgttactggatgaacccttcggcgcgctcgatgcgcaaacccgtctgatgatgcaggaactgctgcgtgaggcctggctcaataccggcaccactctgctttttgtcactcacgacgtggaagaggcgctattcctcgccgatcgcattctgattatgtcagcaaacccaggaaagattgttgaggagatcgccctgccttttggccgggaacgtgatatcgagaatctgtctgaacacccggattacagtgggatcaaacatcatgtactgcaccgggtgcgtaaggaggctaaacgccatttaggttgaaaacggctgcagcaagcaaaggggttatttccgaacttatcatatcgtggttcccggttgttctggtcatatcgaatgaccagacgggcagcgatcgcgtctggccctgcttcggcgaaagtctgcaccgtctaccccaaaagctgagcttacagcattgccgataatcttttttaactgccattaaaaccgatgctggcgcgatttttagcgccagcatcgccttcagacggtagtccccgatgatccgttccggccttttatatttgtcaggtttgctactgcaacaattcggcaaatttcgccagccattgcggatgagcgggccaggcgggggcggtcaccagattgccatccacatgcgcctgatcgataccgatgtcggcaaaatgtccgccgctgagccgcacttccggcgcgcaggccggataggcgctgcaggtgcggccttttaatacccccgcagctgccaacagctgagggccgtggcaaacggcagcaataggtttacgcgctgcgtcaaatgcctgcaccagtttaatcacttgcgcattcaggcgcagatattctggcgcccggccgccggggattaacagcgcgtcgtaatcctgttctttcaccgttgtaaaatcggcgttgagaacaaagcggtgcccgggtttctcactgtaggtctgggcgccgtcaaaatcatggatcgcggtcataatgaagtcgccttttgttttatctggacagaccgcatcaacctgatgaccgatcatttgtaatgcctgaaacggcaccatagtttcgtaatcttcggcgtaatcgcccaccagcatcagaatctttttgcccatcttattcactcctgtatgaagaaaggtgtctaagatatagcctggcgggagagggaatgcgaacctgtggatgagggacggctggcggggcatgccgatctggcggcgatgcggcaaatgaatccgcagctgcaatccattgagtcctggccggcgggaacaggacgcgtcgctttcgaacgggcgctggcaatctctgccggccgggcctttaagcggtaaacccgctttacccggcgccaggcaggaattaatgagcgagaggtattattgtaagctctgttttaatatatctgctgaatgaaatgccgctatttcttttgcgctcagcgcgactctatacgttgtccggtttaaccatcgataccggatatttggcaagtattatttgtaagttttatattaatcctgtcagccattaattatagccatattaaaatccactactggacttttttatggccggtaaaggataaaaaataatttatttcttacgcccctgttcgcgcgcgtttcagtatccggaacgaccagtatttgcgttacatattgatttgcatcaatcaacgctgcctattcagatatgaatttaattcacattcctctgtcaggtatacatcctgcctttattgtaagaaaagagttgttattacataccagctttgtttgtctcatgcgtttcatttttacatttgccttaagatgcctgaggaaagtcttataatggactttgcaaccggcaggttgatattttttggcgctttgctctactatatccgggtcttcacacaccgttatctttaacacattattcctcacgggaagggactgctatggctgatacgttccagaatgaggtgcccaaggcacgcattaatttaaagctggctctgcacacaggaggcgcgcagaagaaagtcgagctgccgctgaaactcctcaccatcggtgatttcagtaatggcaaagaagaccggccattatcggaaagagcaaaaatcaacgtcaataaaaataacttcaacagcgtactttcggaattcagcccggaaatcagcctcacggtacagaacacgctggccggtgatagcgccgaagaaaatattcagctccgcttcgccgatatgaaagatttcgaaccggagcaggtggcccgccagatcccccagctccgcgccatgctggcgatgcggaatttattacgcgacctcaaatccaacctccttgataacgccactttcagaaaagagcttgagaaaatcctgaaagacccggcgctgacgcaggaattacgcgacgaaatgagcgcgctggccccgaaataaacggcgtgcgttatttaatggattaaccgggaatatgctgatgtctgtaaatactgaaaccgcccccgcgcaggggcagaccgctgtactggaaaaagagagcgtttacgcttccctgtttgacaaaatcaacctgaccccggcgtcccgcctgggcgatattaacgactttctggatgatgccgcgctgtccgacgccccggcgggcgaacgactgacggcggcgatgcaggtgtttatggactgcatccgtcagtccagaaagaccgtggagaagctcgacaagaccctgattgaccaccatatcgctgaactggactatcaaatcagccgccagctggacgcggtgatgcaccatcctgagttccagaaggtggaatccctgtggcgcggcctgaagcagctggtggacagcaccgactaccgccagaacgtcaaaaccgaaattctggatgtctccaaagacgatctgcgccaggacttcgaagacgcgccggagctgattcagagcggtctctactggcacacctacaccgccgagtacgacaccccgggcggcgagccgattggctcggtgatctccgcgtatgagttcgacgccagcccgcaggacgtggcgctgctgcgcaacatctccggcgtctccgccgcggcgcatatgccgtttatcggcgccgtcggcccggccttctttctgaaagagtccatggaagaggttgccgccatcaaggatatcggcaactacttcgaccgcgccgagtacatcaaatggaaatcctttcgcgacaccgacgacgcgcgctatatcggcctggtgatgccgcgcgtgctgggccgcctgccgtatggtccggacaccgtgccggtgcgcagcttcaactacgtcgagcaggtgaaaggcccggaccatgagaaatacctgtggaccagcgcctcgttctccttcgcgtccaatatggtgaaaagctttattaataacggctggtgcgtgcagatccgtggcccgcaggcgggcggagcggtgaaagatctgccgatccacctctacgatctgggcacaggcaaccaggtgaagatcccgtcggaggtgatgatcccggaaacccgcgagtttgagttcgccagcctcggctttatcccgctgtcgtactacaaaaaccgcgactatgcctgcttcttctcggccaactccgcccagaagccggcgctgtacgacaccgccgacgccaccgccaacagccgcatcaacgcccgtctgccgtatatcttcctgctgtcgcgtattgcgcactacctgaagctcgttcagcgtgaaaacatcggcaccaccaaggatcgccgcctgctggagctggagctcaacacctgggtgcgcggtctggtgacggagatgaccgacccgggcgacgagctgcaggcctcacacccgctgcgcgacgcgaaggtggtggtggaagatatcgaggacaatccgggcttcttccgggtgaagctgtacgcggtgccgcacttccaggtggaagggatggacgtgaacctgtctctggtttctcagatgccgaaagcgaaagcgtaaggcgggggcagggatgaaaacagtacgaccgctgtgggggcggggccagatggtttcccctcaacattttcagcaggaggccgcgcaagcggcctggcacacagagtgtgtcgcccgactgggagcaatacatccctggggggttgcgcggacggcttttgacgccgcgctgctgaaacaggggaaactgaaggccgaccacctgtgcgtgcgtttcgctgacggaacgctcactgatagcgataacgccgatgcgttgccgcccgtgatgaccttaccggaaacagaaagccacgaactgacggtggttttggcgctgccccatgagtatgaaaacggcggcaactgcctgcaaccggagcagaaagcggagcgtcctgtgcgctggcgtctggcctggcgggaggtgcgtaaccgctatggggatgacagccgccagattgcggtaatgcagccggagctgacgctgcgtacagacgataacgacaacggcaattaccagaccgtcgccgtggcccgtcttaagcgcgacagccagggaaactggtcgcaggacgcgtcgtttatcccgccgctgctgaacgtgcaggccagccgctggctaacggagcagaccgaatatctgacgggtcagctacgcgcgcgcctgcagcgcctgatgtctatgcgccgggagagcaacgaacggatggccgacttcgcggtggcggacgtgtcgctgttctggctgctgaatgcgctcaacagcgctgagccggtgctcagccatttggtgcgctatccgcaggtacacccggagcggctttatcaggcgctggccggtcttgcaggcagcctgctgacgttttctcttgatcacaccaccgccgatattccggcctatcgtcatgagcagctaacggcggtcttcccgccgttgtttgacctgctgggtgtgctgctggaagccagcctgccgtcgcgggtcgtggcgattgacatggtccgcgatgagcggcgcaagcgctggcacgcccgtctccacgatccgagactgcgtgaagaggcggatttttatctctcggtacgctcgccgctgccggtagcgcaactgctggagcagtttccgcttcagtgcaaagcgggtagcccggatgaagtcgacagggtggtcaatggttcccagcccggcattcctttgcgcgcgatgagccacgtccctgcggctatcccgctgcgcctggaaaaccagtatttcacccttgatatggcccatccggcggcgcgggcgatgctgctggaaggcagttgtgtcttttacgtccccggtctgctgggcgatccggaacttgaactgtttgcggtgctgcgctcatgaaacaggacataaatatcgacgccctgatggcggacgcgtggctgacggtgacagaactgcggttcggcgcaagactggccgacggggagggcgaccgcctgtggcgacattgtgtagatcatattgaacaggtgatggcgaagctcgaggctgcggacgtcagcgaggcgagccgtcggcatattctctacgcctggtgtgcgctgctggatgagaccgccaaagggcgcgaaggcgaggatgatgcctgcatcgtctggtatgaccgtccgctgcaggcgaaatactttggtgctctggacgccggagacgcgttgtatgaacggatgcgacaggttctgcgcgagcccgcgccggatatggcggtgctgacctgtttccaccgggtgctgatgctcggctttaaagggtgttatgccctgaatgaaccggctcgtgaccagcttgttcgggtactgaccgagcgcgtgccgccgtttgaaacggaccagagccgtcccgtactggcgggtatctccgggcgcagcggcctggcggacgggttacgtcgctggccggtttgcatcgggctgtcgctggtagcgatcgccgcgctgtggtggggtctgaaccactggcttgattccctgattgcaaccctgctgccgggggccgggaaatgaacgtgcgctatttgcgcctgttatggctctggggcgggatcctggcgctgctgctctgcctgctgtttctgccgctggcctccggcggacggattctggccgctgcgctgatactggccgccgttatcgccgggctgattttcgccgggcgcaggcgggaagatccgctggtagataacgcctggctggatgagataccggacgcgccgtatcgcctgccggtggtgctggtctgcggtgatatcgccgggtggccggagagcgggccagtttaccgcacggcacggggctgctggttaaacgtcccgacggctgaactgcagcagacggtacgtattcttctgtggaaacgcccggacctcgtatcgcagctggcggtgatggtcagcgtctgtccgcagctgcatcgtgatgaggcggcgctggcggccgggctttatgagctgcgctggcagctgagccaggtgcggagcgattgccgccgggcggtgcctttactgttgaacagtaaggtggtgggggcgtctgttccacaaccgctgtggcagacagcgcaggccggggaggccatgcaggtatggctggcggacgatgtgccgtgcagcaccgggacatggctggcgcaaaaggacgggacggaccgcctggctgcgcaggtgaggatgaatacgctggttcgcctgactgaacaaacaatgatggccgcgctgacggcggcgtcggacgatatgcctccggcggacccggcgatggtggtatatcacatgacgccttcgggggcgccggttctggctgatagcctgtggcagcgctggttgtctcaacatactgccctgaattcgctgcccggctggcagcccgaaccctcatcagcggatgtcacgctgccgaattttattctgccgctgttgccactgggcgccggcgtgacgccgctcagcagaactttacggcgggcattctgcctgttcacccttgccgccatcatcgcactgtgcgccagcgcgtggaacaaccgccagctgctgcagcgggtggggttcgatattcagcattacgcgcagattgcgatggatgactacgccccgaaagcccgcgccgtgcagatcctgcgcggggatgcgctgcagctggatcggtgggcgcgccacggtgaaccgctggaaatggggctcggcctgtatcacggggagcatttgcgcatgccggtgcttgacgccattcgttcctatgtcccgccgcctccgccactgaagcctgccgagaaaaccgcgccgaaaatcatccgcctcgacagcatgtcgctgttcgacaccggcaggtgggtgctgaagcccggctcgacaaagctgctggtgaactcgctggtcggcattaaagcgaagcccggctggctgattgtggtggcgggccataccgacagcaccggcgacgataaatccaaccagatactttcgcttaagcgtgccgaatcggtgcgcgactggatgcgcgacaccggcgacgtgccggagagctgttttgcggtgcagggctacggcgagagccgacccgttgcccccaacgacacggccgaaggccgggcgctgaaccgccgtgtcgaaatcagtctggtgccgcaggcgaatgcctgccagccaccgggcatgacccccgcgccatcgcaggatgatggcgctttttaaaatgatacacacagtcattcgggctgcctcgcagcggcaactgaatgggtccccggaagcatagttcactatgtgaccggggcaaatgaaggcagccaacaaagaggcagcctgaaggacgacgtgtataaatggagaagtaatatggcaattccagtctatctgtggctgaaggacgacggcggcgcggacatcaaaggttccgtggacgtgaaggaccgcgagggcagcatcgaggtggtggcgcaggagcataacctgtacatcccgaccgacaacaacaccgggaagctgaccggcacgcgtatccacacgccgttcttgttcaccaaggaaatcgacgcctccagcccgtacctgtacaaggcggtgaccaccggccagacgctgaagtcggcggagttccgctggtacaaaatcaacgacgccggtcaggaagtggagtacttcaacacgaagcttgagaacgtgaaggtggtgaaggtcaacccgctgatgcacgacgtcaaggacccgtcctacgagaagcataaccacctcgagcagattgagctgcgttacgaaaaaatcacctggacctacaaggacggcaacatcattcattccgacagctggaacgaacgcgccaccgcctgatgactcgccatatttcacgctgtagcgccgttggctgcgttcgcctgccgtcttgctacagcgcgaactatttagagtcatcccctgatgggcagtttccgctgcccgtttttgctgagcgcctgaactgacgggcgctcagcaaaaaaacaatctgcctgcctgacctgatgcgctttgggttcctgaataacagggaacagcgacgggcggtagcgtgtacggaactgataaagagaaaagctcatggaaaatcccgccattttgttacgccgacttaacccttactgcgcccgtgcgatggaaggcgctgccaccctgtgccagacccgggcgcacgcggaaatcctgcctgagcactggctgctgaaactgctggagcagggcgagggcgacctgacggtgctggcgcggcgctacgaatgggatatggacgcgatatggcaggatttgctgacctttatggataagctcccccgttcggtgcgcggccgcccgcagctttcagacgctattcagactctgatgcaggaggcatggctaagcgcttcgctggccggggaggagcatatccgtagtatccacctgctgatggcgctggtggataaacagagtctggtgcgctgcgacggcctgtggccgctgctgaccctggcgcagagccagctggcgcgcctgcgtccgctactggacgcgcagtccgaggaacgcccggaggtgcagcaggaagcagagctggcgcagggcgacgaggtggcgtttgtcggccgtccggttaatgcgggcgtaaaagaaggggatctgaatccggccctgcagaatgcgctggataagttcaccctcgacgtgaccgcccgcgcccgggacggcaaaatcgacccggtgttcggccgtgataatgaaatccgccagatggtggacattctttcccgacgccgcaagaacaacccgatactggtgggcgagccgggcgtcggcaagaccgcgctggtggaaggtctggcgatcagaatcgccgaaggcaatgtcccggacgcgctgaaaccggtaagcgtgcgcacccttgacctcggcctgctgcaggccggagcgggggtgaagggagaattcgagcagcggctgaaaaacattatcgacgcggtgcagcagtcgccgctgcctgtgcttctgtttattgatgaggcccacacccttatcggcgcgggtaaccaggcgggcggcgccgatgcggctaacctgctgaaaccggcccttgcccggggcgaactcagaaccatcgccgccacaacctggagcgagtacaaacagtattttgagcgcgatgcggcgctggagcggcgcttccagatgatcaaagtcgatgagccggacgacgacaccgcctgcctgatgctcaggggcctgaagtcccgctacgcggagcatcacggggtgcacatcaccgatgaggcggtgcgcgccgccgtcaccctctccagacgctatctgaccggacgccagctgccggacaaggcggtggatttactcgacaccgcctccgcccgcatccgcatgagcctggatacggtgccggcaccgctgacccgcctgaaggcgcagctcaccggcctggcgatggaaaagcaggcgctgctggaagatatcgcggcgggcaaccatacccacggcgaacgcctggcggccatcgaacaggacgaagtccgtattatcctgcagctcgacgagctggaaacgcagtacggccaggagctgaagctcacggaaaacctgctcgcctgccgcgccgatatctcccgccaggcggaaatcgcggacctgcaaaaccagcttagtgccgtgcagcaggggaacccgctgctggggctggacgtggacgcgcgcaccgttgccacggtcatcgccgactggaccggcgtgccgctctcgtctctgatgaaggatgagcagacggagctgctgagcctggaacagcagctcggtagacgcgtggtgggccaggacgcggcgctgaacgccatcgcgcagcgtctccgtgccagcaaaaccgggctgacgtcggagaacggcccgcagggcgtgttcctgctgaccgggccgagcggcaccggcaagactgaaaccgcgcttgcccttgctgacgcgctgttcggcggtgagaaatccttaatcactatcaacctctccgaataccaggagccgcataccgtctcccagttgaaaggctctcctccggggtacgtcggctacggccagggcgggatcctcactgaagcggtcagaaagcgtccgtacagcgtggtgctgctggacgaagtggagaaggcccatcgggacgtgatgaacctgttctaccaggtgtttgaccggggttttatgcgcgacggcgaggggcgggagatcgactttcgcaacacggttattctgatgacctccaacctcggcagcgaccacatcatgcagatgctggacgaacggccggaggccatggaatccgacctgcatgaactgctgcgtccgctgctgcgcgaccacttccagcccgcgctgctggcgcgcttccagacggtgatctaccgcccgctcacgcgggacgcgatgcgcacgattgtcggaatgaagctcagccaggtgagcaaacgcctcagtcgccactacggcatgaccactgccatcagcgacagcctgtacgacgctctgacggatgcctgcctgctgccggataccggggcgcgcaacgtggacagcctgctcaatcagcagatactgccggcgctgagcctgcagctgttaagccatcaggcggcggggcagaagccgcagcacctgatgctgggccgggatgaagagggggggattgtgatggagtttggcgcaggggcgggcgtatgagcgagataaaatccctgctgttcagccacagccaccatctgttaacggtgcgcggctgcagcgctcttctggacgtgctgagctttgaaggtgaggaggccctgagcgaaccgttcagatacgtgattgagttcaccagcgccgacaaaaccatcacgccgcagcagatgctgatgcaggacgcgaccttcaccctgcaggcgccggcggaccagggtttcgggattaacattcagcagccggtgcgcacgattcagggcgtggtgacggcgtttgagcgcctttccgcatcccgcgacgaaacgcactattgcctgaccctgcagcctcgtctggcgctgctctcccggagccaccagaaccggatttaccaggatatgtcggtgccggatatcgtggagcatatcctgcgtacccgccacgccatgcgcggggaggactttgtcttcaccctggcacaggcgtatccgcgtcgcgagcaggtgatgcagtacggcgaggacgacctgcgctttatcacccgcctgctgggcgaggtcggtatctggttccgcttcaccgccgacacccggctgaacattgacgtggtggagttttacgatgaccagcggcactacgagcagggactggttctgccgtcggtgccgccctccggccagcacgacggcggtaccgagtcggtgtgggcgctgaaaagccagcataacgtggtgcagcagtcggtgttcacccgggactacaactaccgcaacgcgccggaggagatgagccagagcgcggacgtgacgtccggcgacgtcaccacctacggcgaggcgtatcactgggcggataactacctggcgccgggcagcgacggcctgcgcaacccggagccggagagcggggcgttttatgcccgtctgcgccacgagcgctacctgaacgaccagacccggctgagcggcaggaccagcagcgcggcgctggcgccgggccgggagctgaaggtcaccggaggcgctgaggtgacggaggttttctgccagggcgtggtgattaccggcatccacagccgcgcccgtcgcgaccgcagctatgaggtggcgtttacggccatcccgttctcggaaaattacggcttccgtccgcaaccgggcgacaggccggtcatggccggcacgctgccggcgcgggtaaccagtacgaaaaccaacgatatctacggccatatcgaccgcgacggccgttataaggtcaacctgctgttcgaccgcgaccactggtcgccgggggaagagagtctgtgggtacgtcaggcgcgcccctatgccggggacacatacggcctgcacctgccgctgctggcggggacggaagtggccatcgcttttgagcagggggaccctgaccgtccgtatattgccggagtcctgcacgactcagcgcacccggaccctgtcaccatccggaactataagcgcaacgtcctgcggaccccggcgaacaacaaaatccgcctcgacgacgcgcgtggcaaagagcacatcaaggtcagcacggagtacggcggcaagagccagctgaacctggggcatctggtggacagcgaaaaacagccacgcggcgaggggtttgagctgcggacggatagctacgggactatccgcgccgggaagggaatattcattactgctgatgcacaatcgaaggcgcagggacagcaattggcgatggaaccggcgctgtcgcggctttcagcggcactagtggaaatgcagtcactggctgccagcgcacagcaggcacaggcgctggctgcggatgttggacgtcagcagacgttgctgcaacagaagatagagcagcttcagaaggaagtactcctgggaacggccccgcagggtgtggcgctggcaagcggtgacgatatgctgctgtcggcgcagaagaatctgacgctgattgcaggtcagcagctggatatgggggcgcagaaggacttcacactggcggcgggtaaacaactcagtctctggagtcagaatggggcgaagtggtttgcgtcgcggggggatattgatattcaggcgcagggcggacatatcaccacttggtcaacgcaggacacgcatatttcgagtggcaagaaactggtaataacggcacaggatgaactgacgctgatatgcgggggcggatatatcaaaatcaaaggtgggaatgttgaaattggcggtcctggaaagttgctgataaaaaacatcggtattaagaaagcaggttcgggtagtatgcagggagtaatgaagtcgtttgagtcgggaagttttgatgagaagtttgtcattcgaaattctctgaccaaagaacctttagccaataaggcatattcaataaccatgccggatggaaggattgtttcaggggtgacagatttaaatggttctacatcattaaatgcctcggatgtcattgatgatatgactatcactcttattaaaggtaggtaagatctcagtctttatttatgggggagcgaaatgttactgatgatttattctttgttaataatttatgcgctaatcgcagggagtttgcttacattagttgcatggctttgttgtaagagagttcatggtttgcgtatcatattgctgatttggtttgtgtgtatctgtgtggcgtttgttgctttgtatgctctgcaatttactgaatttggtctcatacgataatgctatgttttcaaaacaggaggtagtatggtatataagactgagccagttagagattaaatatgatgataatggccatccttcttggtgttcttttccatcgcataagaatgttcaggttcgtggagcttgcgatgtgccacctcatctgcctggacttgtaatacttgtccatggtgttaactccacaggtgaatggtatcaaaaagcagagtctgcattatgtgcaggattgaataaacgccttggacttgaaggcactaattttgagttaaaggctaacatatatagtggggatgacaagatagaattagatgagaaaggcgccgaaaaaagaactccaatgtctccattagtagaaaggaaattagttactgacaatggccggtcacctgtaattcgattttattggggctattcatcaccattaggtgacgaagataagtttgttattcctttggtaagtattaagggtgatgactatcatcagatgaagcgagatggcgtcccattgtatgatattttgaaaaaaaggtccttatatatggggcggcggtccttttcaaaatggcacgaataatcttcattcactttggagtaaaaaaggattcaatgaagatttagccaatatacctggtgcaaaagttcaatatggtaatgaagacaaagatcgcttactaaccacagcaccaccacgaaactattatgctcatgccgcgaagcggttagctgatttattggatcttattcgagagaaatatcctaaggatacagttaccataatttcacatagtcaaggaactatggtttcaatggctgctactgcactggcaaataaagcacctgatgctctatttataatgaattcaccttatgcccttcataatagtcaattgaatgccttttcaatgcctcctgaagaatgtatttctccatctggtcgagaaagtactctgtcagcaataattgataaagttgcacttcaatcaacacatttatcttcgttaggctatgaggggttgtgtgtaggtcaatcacaggataataaaaactggaagccagatataactcttgtagctcctgacaaaaatgaaacgagaaatatccaggaaagagataatcacgggaggacttatgtttatttcaatccacatgacagagttatgggttccctccctctgcgttcgatagggtggcaaggtttcccaaatgatgaaaaaggcaatcctcatccacttatcacccagcataaggggtatttattccagcgaatgcttgccagaaatacaccttgtggtatagctcccgagtcaaaaactccatttggtcgattgccagatggtaaacccttttgggatgatgaaggagatgaataccagagcagtggttttgtgtacccagatccacctcactggcaaactgtatttattaatgccgaggaagtccctgagccaattaaggaaaatgaactaagtgatttcgataaaacaagagttggtgctgagcatggcccacaggaaaaaaacggttggggggagcgtgatcctaaaactggttataagaatgacgatacttacgataatttcattaatttgtatcccgatcaggatatcgttattggtgtcaaaaaacaatcggaatatggtacttacggtagcgtaaccccagtaacccgtaaggagacgtttgacgaaaaagatcgcaggatacgttcatatgtcgcacaacctacagatcacagtaccttacccagtaatttaaattttatggcacgagtcgttgcttatgatttacccattggttactgtgaatcgggttgggatagggcttttatcactgatctacgccgtcgggcagactggactcagggactggatacatatttaaaaaccggaattccaaacaatgttactgaaccagaaataatcagcaaagaaacagcattggaagaaatgattcgtgtgaagaccaaagaatacggatattgatatgggaaagaaaatagttgttcttggcgatgctacctcgcatggaggtaaagtagtctctgtatcatctacttttgaaattgaaggtaaaaatgttgcactgctgaatgattcggtgtcctgtccggaacacggttctaatccgatagtggaatgcgatatgagttatgaggaaaacggtaggggaattgtggcgcatggttgtaagagcgcctgtggttccgtgatcttcgctagtttgccggatgtggagataggttgatgggctggtcattaccggaggttcccgcgaggccagatacgcaaccctggtcgccctgggtatgcctatcaattactttcgccggtgtatttatcgcgttagttcgggtcgtactgcattcaccctccggtagtttaccaacgctcgcaagcggctactggctaccactgaccggatatactttggtgggtgttacaattaccgtaaccttttatttgttatggtgggaaatacagactttccgcgtccgtaactggaataactggcgacgaaatatgcacctggcctggcagcgtcaagcacacctgcatttatgcgtgaccaggcatgtggtattaaccgcagacccacaattgctttctcgactagcgggtgttgcgtctgaaagcagcgacgaaacatctttattaacattgcttcccgaagaagcttttattcctggtatttcacgctttgaacaactttgtcgtttattaataaaccagattaaaacaatactttctcaggcctatccttcaggtccgttaacggtgataataaagacatctgctcctgataaaaaacaggaaattcagtatttttcccttctctgggaagatgaaaaattgccatggatgccagatattcatgccttatccaattcgtcagtttttaataattggaataaattcctgtctactgctcgttatccattgcttgtactggcactgcattaccgccagccggaggaagccttagcggaatttgcctgtgcgttgttgctgttgcctgaagcgatgcttaaatcgtcagaacagcgcgatgcagtgcgagtatttcgcgccatgccgctgaatactggtgcattgccccgcgagctggctgaattgcgcgatatggcgcagcagccttctggtgtaaaacatctggtctggcacagcgggttatctacgtcgtccgcacaggcgctgggacgggtggttaatgatttacctctgcacctgcatactgatatcgcagccggtggcattatcgattttgcgaaaatcagcgcagactacgggcatctggcgggatggctgatggtagctgcagcagcagagatggtcaattacggtccgggaagccactggctgctacaggcggatgacaaacgggccggcgcaatggtcgtcggcaataatctgccggttatctgcgatgaagatgtgaacatactcccgttgccttatccggcgggttcactctgccttgccgtattgctcaacgtggcggcttttgggggcgttgcccgtttttttccggactggctgttctcctggtgcggcgtgctcagtatgttactgtcgctggcagtcactctacccggtgctgttttcctgctgcgccgcgccctcactgctctgcaacgcccccactttgttcaggctgccggacttgcccgcaaggaataatccaatatgaaaaggtttttatacatcctgggagcgggtctctgtgtcctggttgttttgttggcgctgttgtttattctggcccagacaactcatcttttttttgaatggacgggggaacgcgtattctggatttcgctgttgggtgcggtttttctgaccagtctgttgagcgtgctgattttttttcttatccctttccaaaaaaacgacaccccgctgactccgcagtacagtcgcccggcaggcgagggggctggtacacaggaacgagatatctccctttcttcgctaaaaaagcacctccgccgccgctacaacctcttctggcgcagtaaggtccgcctgctgctggtctgtggcgaacccgaacatatcgccgccatcgcccccggccttgccgaaaaacagtggcttgaaggccaccgcacggtgctgatttacggcggcagcctgtcatcggcgccggacaccgggcgcctgaccgccctgcgtaagctgcgccgcagccgtccgctggacggcatcgtgctggcgctggatgagagacagaccaccgccggtacgctggataaccatcttcgcgccctggagcaggtcggggaggcgctgcgctggcagccgccggtgtacctgtggcaggtgactgacagcgactggtcgcaggatgcgcgcgtcacccagacggtaggggcgcttttcccggcccgcgccacgccggcgggggtggagcgccagctccgcgctatcctgccatccctgcgcgaaaggggaatgcagcagctgtgcgccgggccgtcgcacgatttcctgttacgtttcggccggcagctggagaaacagggaatagcccactggaaaacgctgctgacgccgtggctgacggagcacctgaagcgtgttccgctgcgcggcctgatgttcagcccgtcgctggcccctgaggataatgccgcgggccatgaacaccgctggtccgctccggcgatctggcagggcgtgacggcggactgcgctcaggcgcggggcgtgcgggtagggatgccgtggcagcgaacgccgggcgtcaccctgctgacgctgattgccctgtggggggcgggcagcgtggtctcctttgccgttaaccgccaccatatcgtcagcgcggcggcgcgggcgcagcagctggtgaatcatcccgcggttaacgacccgcagctgatggcgctgcaggccctgcgtaacgatatcgggcgtctgcagacgcaacaggcgaatggcgctccctggtaccagcgcttcgggctggaccacaatgcgccgctctccgccgccctgatgccctggtacggccgggccagtaaccgcctgatacgcgatgcggccatgcaggcgctgacgcagaaactgaccgtcctggcgaacctgccgccgcgcagcccgcagcccgcagcgcgccacgtcagctaaagcgggctacgaccagctgaaagcatacctgatgatggcgcgcccggacaaagccgacgctgccctgtacgcgcaggtgatgacaaccaccgcgccatcccgtccgggactctccccggcgctgtggcagagtatcgccccggaccttcacgccttttacatgcagagcctgccgtcgcagccagcctggaaaatcacgccggacaggcagctggtcacccgggtacgtcaggtgctgctggagcagattggccggcgcaacgcggaaagtacgctgtatgagaacatgctcacccgggtgcgccgcagctacgcggacatgacgctggaggacatgacgccgcagaccgacgccggtcgcctgttcagcacgccggagtcggtgccggggatgttcacccgccaggcgtgggagggcggggttcaggaagccattgataacgccgtggcgtcccggcgcgatgaaatcgactgggtgctgagcgatagccgtaaaacgctgcccggcgacgtctccccggaggcgctgaagcagcgcctgacggcgcgctacttcaccgattttgccggtgcctggctgaacttcctcaacagtatccggctgaacccggcgcacaatattgccgacgtcaccgaccagttaacgctggccggggacgtgcgccagtcgccgctgattgccctgatgaacaccctggcttaccaggggcagaccgggcagcagaaagaggccatttccgcatcgctggtgaaatcggcgaaaaacctgctgggcggtgatgaccggccggtgattgaccagcaggccgccggaccggcggggccgctggacagcaccttcgggccgctgctgcagcttatgggtaaaaacagcgcgcagagcgtgatggcggcggacagttcgctcagtttacagacttacctgacgcgtctgacccgcgtgcgcctcaggctccagcaggtggcaaacgccgccgacccgcaggcgatgatgcagcagctggcgcagacggtcttccagggcaggagcgttgacctgaccgacacgcaggagtacggcagcctggtggcggcaagcctcggtgaagagtggagcggtttcgggcagacgatgtttgttcagccgctgacccaggcctgggagacggtgcttcagccgtcggcggccagcctgaacgaagcgtggcagcgctcagttgtcgcgaactggaattcagcgtttaaggggcgttatccctttgctgccgcgaagagcgacgcctcgctgccgatgctggcggcgttcatccgccgcgataccggacgtattgaccgtttcctcagcacgcagctgggcggcgttctgcaccgggagggcagcacctgggtggcggacagaacccacagccaggggttgacgttcagcccggccttcctgaacgcggtgaaccagctcagccagctgtccgacatcctgtttaccgacggcagccagggtatcagctttgaactgcagggggtggcgatgccggaagtggtggaaacacagctgacgcttgacgggcagaaactccactattttaaccaggttgccgactggcagagcttccgctggccgggggtaatcaataaaccgggggcgatgctgacctggacgtcgacggcggcgggaacccgtctgtatacaaaccacagtggtccgtggggcgttatccggatgctggagcagatgcagcggcagaaagcgggggacgggctgtaccggctgagcgtcaccgcgccggacaggcgacagcttcagtggctgctgcgtacggaactgggcgacggaccgctggcgctgctgaagctgcgaaacttcagtctgccgtcgcagatattcagcgtcggtgtcccggcgccaggccgcacggatgaatatgaatctgacgttgtggaagggagtgaataatggcctctgttgatattctgctcgccaaccgccggagatccccccggcaacgatgatttcaagaagatgcgtgatgaggtaagggcgcgcaacttattgcttcaatgttcaatgttcaatgttcaatgacactgatgcgatctgaggttgcagaaaacacctatcgcgatcttctccccattttaaacgcacctcctgtagctctaaggctaaaagcatatttctatggacgacttaaccctgcgttattttgacgccgaaatgcgttacctgcgtgaagcgggcgaagagttcgcccgcgcccatcctgaccgggcggcggccttaaatctcgacaaatcgggcgcgcgcgacccctatgtcgagcgcctgtttgaaggcttcgcctttctgatgggccgcctgcgcgaaaagctcgacgacgatctgccggagctgaccggcggactggtgagcatgatctggccacactacctgcgtaccattccatcgctctccattgttgagttcaccgcggactggcgtgaactgaaagaacctgtccgcattgaaaaaggctttggaattctttctcagcccattggtgaaaagcgcacccgctgtcattacaccacgacgcagccgctgaccctgcagcccctgtcgctagcccgggcggggatctcgacggaaccggatgggcgctcgcttctccgcctgcgctttgagtgcagcccgctggcagactggagccgcatcgatttaagccgcatcccgctgtacctgaatggcgacgcgccgctggcctgcgccttgcatgaggcgctgacgctccgggtggcgaaaacgggtatccgctttcccggcgatgctgaccgcagaccgctggacgcccgttttgccgtctgcggtttcagtagggaggaggcgctgctgccggagtgcggcagtttcagcggttatcagctgctgctggagtattttaccttccgtgaaaagtttatgtcggtgacgctacgcggcctggaaaatgtggatttcccggaagaactggcgtggtttgaaatcgatatcgtgctggagagacagtggccgcatgaatatgcgctgtcggagaaacatctgcgcctgcactgcacgccggtgattaatctctttccgctggagtccgatccgctgcatctggactcgttacagaccgaatacctgctgcgcccgatgcgtgtccaggacggtcataccgagatttattccgtggattcggtcacctcctcgcgccactccggtcaccagacgtatgtgccgttcaccagcttccgtcacaagggaggaatgctgcgccatgatgcgccggaatattattaccatacgcgggtaaagtccggtccttcagggctgcacgacacctggctgacgctcggcggcgaggcgtttgataaccacaccgtaccggagaatgaaaaactgtcgctcagcctgaccggcaccaacggccagctgccgcgccgggcgctgcagagtacgctgctggacacggtggtgaaatccaccaccgcgcgcattcaggtgcgtaacctctgcgccccgacgctgccgtgctacccgccggaccgcgatcgttttcactggcgggtgctgagccatctcggcagcagtttcctgtggatgatggataacgccgacgtgctgcgcggcgcgctggccctctatgactggaccgataacgagatgaaccgccgccgcctggaagcgattgtcgatgtcaggcatagcgaggtggaacgttttgcacagggccattttctgcgcggcgtgcagattgaggtgaccctcgacagcagcggcttcgccgggcacggcgatatctgcctgttcggcgagatgctgaaccgcttcttcgcgctgtataccgatattcacctgttcaaccatctgattctgatactacaacctgggggagagcgcctcgaatggcaggagaaccacaaccgccgcattcccggctaagcccccggcttgagcgggaaatctatcgtatcaacttctaccgcttctgccagttactggaaaagcgtcgtccgggcgcatcgccgttgggcagcaccctgaatccggtggacgatccggtacggtttcgcccgcatccgggaatgggcttcccggtcagcgagctgaaaacggtggaatatgatgaagaccatccggatgcgccgccgacggtgcgcacgacgtttatggggctctacggcgtcgactcgccgctgcccaccgcgtggctcgacgagatcgcccagcagcgggaagggcacgaagcgcaggaggcgtttctcgatatctttaaccaccgcattctgacgcagttttaccgcatctggcgaaaatattcctacccggcgacgtttgaagcggggggcagggacagcacctcgcagagcctgctgggccttatcggtctgggaatgccgggtaccgataagcatatcgccaccccgatatcgcgttttctggcgctgctcggcatcatgcgcctgcctgcgcgtaccgaagaggggattcaggcgctggtacgtctgctggctccccgcacgcggaccaccgtcacgccgcactgcccgcgcacgtttttcatcaacaatccactgggtttttacggcaatgacgattttctgctcgatggctataacgtgctgggcgacgaaacgacagaggtcagcagccagctattgattgcgctgtacacggacgatattgccgaggcgcaggggtggttaccggaagggcagatatatcaggactttctggtcctgctgcgggtctatctcggctggcgctataaagcgcgtatacagctgaccgttcctgcccggttactgcctgcgccggtgctgggcgaaaccccctttatgctcggcatgacggggatactgggcgtggagggagaggagatcccgcccgatatccccgccacctttactattgagcctggcggctattgcggaatgccgtctgcaactttacaacaaggaaaccagcgtgttgcataccacttcgattaaacgatggagtttacttcttatgcctttactgctgacaggctgtggcctgacgcagaaaattagcgacagcaccttatcggcggtgaaatcggtgttttataagcaggtaaacgtcctgcatctggacgttaccgcccgggcggaactgaacaccgatgagcgggagaacacctcgctctcccagccggtgatggtgtgggtctaccagctcagtgaccgcaagacgttcgataaacgggtctatcagcagctggtcacggaaagcgaggaggccgccggagacgaacggcttgccagccgtagcctggtggtaaaacccggcgctgacgtcagcctggatattccgatggacgagaaggcgcagtttatcgcggtggtggggttattccgggcgccggatatggtgaagaatgactggaagctggtgctgaggcgcgacgatctcgatcccgacaaaccgcgcattattgaagccagccataaccgcctgacgctgaaacccctgaaggatgactgagatgcccacacgccataatgccccctcgctgtatgaaatgctgtacggcaactttaccggcggactcgacctgcatcaggtcagtgaggaaaaccaggttattctgtcggtgctggataatatgcagcgcgtcctcaactgtcgagccgggacgctggcgcacctgcccgattacggcctgccggatatgactaaaatcctccaggggatgccgggtacggctcatgagctgatgggcatcctgtcggccgtattgcttaaatatgaaccgcggctgaagaaaattgacgtggttctgctcgagcaggctattcccggcgagctgcgttacgccattgacgcggagctgaagggcgtaggcctggtgcactacggcaccgaatttatgcccgagggcagggtgcttatccgccacctcaaacagcagcagtacctggaagtccgctcctctatctagtttttattctggctgaaaccatcatgacgactccttctgaatgttgcctgaaaaccggcggcgacccgcgtacgcttgcggattacgcgcgccttcgcgatgaaatgaacaaactaacccatccggcgcgcccggatgtcaactggcggctcgcggaaaaactctgcctgtcgctgtttgagcacaacggcgtggagctacagactgccgcctggtatacgcttgtccgcatgcatctggcggggctatacggcatgaatgaagggctggcgatactggtcgcgctggtctcccggcagtggggcaatatgtggccgcagccgacgactgcgcgaatcaaaatactcagttcgctcagtcaacggctgcagcaggcgatgcgcacgctgtcgctgacctatatcgacctgagccagctttaccaggcagaagcgcatctgacggcgctggatgacgtactgcagcgtctggaactcaaacatgccggccagcttgatgccctgtctatcctgctgcacaacgcggcggtgcggctggagagcagcgaaaataaagaggagaccgcgccgcaagcggccgcgcctgatcctgccccttccagcctccctgaaccgaccgcgcaggtgaaatgggtctatgtcgccgaaccggcatcgcggccgaatgctgacgttgtgacggcattcccggcgcccgcgaagccctggaagccgtttgtcgccgggatgctgactatgctggcgctggccggggccgcggcgggaggatggcgggcaacgtacccgtccgattcggggcagatgcggtttcccgcccggttctctccgttacccacggtgctttccgctgagcagttacagacgctacgacaacaatccccctcggcggagccggggataaaacagactcagcagcagctggcgcagcttttacagctaaaaccggactgggctttgagttatggtactcatctggcgcagcaggcgctgacgctatggccagagcaggcgaaaccgctggcgcggcaatggcaacagcaggtcagcgccgccgcgcttcccgtggagaatctcagcggctggcaccagggaatgacgcagctacagcagttgacgaaccggcttaacgcactggatgaacagaaggggcggtatatcacggtgagtgagctgaagtcagcggtgtttgccataacgcagtcgttcagccgtaccgttccggcggaagagcagctgcgacaactctccgcacagccgcgcaatcagccagggtctgcggcgcagcagaaccagacggagcagcatctgcaacaactgattgcccgctatgctgcgctgaaacaaaaaacggcggaataagcgtgcaatagccacccgcacgggtcattagcgtgacgcatgactttcgctatcggaacggccggttgccggcctgatgcgacaaccctgccacacccggcaccggcgcgcctgtcgcgccggtgcctcctttcagcgtttaatctccccagacagggctctctaataacgtcgtaattcactggcttcccagctatacgcgtccctggcgattaacgtgtcgccaagctcctgataatcgaaatgataaaactcagcgcgggcgccataaccggagtagtcgactgccgcaaggccaacaaacgctccggtaaagaatccgccatagctttgcaggacataatcatccgaaaggatcgcagcatctagcttcacagggatttcagtgaactcaaccccatcaaagctatattcatagctatacgtttccttcctgactttcgtccggaaccagacatattcaacgtgctccgggaccttgatggcttcatcttttaaatatgatgtataccgccctcggttattctcacctatttcaatgaccttaccgttaatttcattccaggtaatgaacacaaaactccagtgacgatcgttatagtaattcgttaacccggccatttgctggtagttaaatggattaaatttaactttaactttcgcatcaaaataaaaggcttgccagcgtcgggcaatcagcgacaggtcatgggtattcgctaaagatccctggccaattaacgttaacttgccatcgccggtggtacccattttttctgtaaacggcacccgcagggtgttccagttaccatcgagtgtcgccgttgtaaattcgtcgtgctggctacggtcttccggactttcggtatcaatggcatctttcgggccttcgacaaacgtctttccgccgtgaccgccttcaatacgcggccagccgccttcatcccagtacaccttctggatagccgtttctctgcccagcgttgaccagccgcgaggatcgtagactgactcacccgggcgattccacggacgcgcgcagagcgaggcgtagtaccattcgccgccgggggtggaaaccaacgcgccgtgcccttgcttttggatgtagctgtctggcgtatcgacgttggttaagaagacctcacctggctccgtttcaaagctgttggcgtctaaggttttagaacgcgcaaccacttcctggtgcgtaaatacggtgcccccctgggcggcaaaaagataataatatccgttcagtttatagagatgcggcccttcaacgagcccaacggcggtcccccgataaagggtacgcgcggtctctggcattaatttcagggtttttgtatccagttcagttaacgtgatgccgtcaaaaggatggtgatattcgcgatggtcccaggtttgctgcacgatatatttccggccatcatcgtcgtggaagagagaagcatcaaaacctacgccgttaagcttaatgggatctgaccacgggccgcggatatcggctgcggtggtcagatagtttgtcatgtctttaaaggcgccttcggtgactttgacgtcggtatacactagccagaattgaccgtcggcataagagagcgccggcgcccaaatgccgcctgatgaaggattgcctttcatatccagcagggtggtggttgacaggggcgaagggagaagattccagtgctccaggtcttttgactcatgtaaacgaacgccagggaaccactcaaacgtagagttggcgatatagtaggtgtcctcgacacggataatactggggtcggcattaaacccacgtaaaatagggttttgaataagtgacatatcattacacctttttatttaaatgttccaaatgcatttaatttatatttttaactacacgcggacttcatcaagctgacggttaatatcggtcacgtttttgtcagagatgggataaacctgcatgatgatcatcgatatgatggctaacgcgatagggatccacaccgcggtcataatgatcccgtcgatagcgctggcgctttgccgggcgccggtttcattaaagccataaacggccagtaaccacaggggaatcgcgccgccgatggtaaagccgattttgaaaaagaggcccataatcgcattaatgatcgccgcatttcgcttgccggattttaattcgccatacgcaatcacttcaggaaccagcgcccacataaagccggtcgcggacgttaagccccattgtttaatgaaggtggcgatgtaagcaagccaaagcgcatcgtgcatgccctcgcgtgaccagacgtaagtcagtagctcgccgacaataaacatggccagaaaaatatggaagaagccttttttaccaaaaattttcttgagtttgggccaaaaaatagggaatgcgatgcccggtatggaggcgacaaggcctacggcgcccatccattctgaatgaccgacaacgtactgattgaaaaagccgttaaccgtgttcatgaaaaacatgaacgtgaaggccagcatgaaaaacagcccgagaataaccagcgggcggttatgtttgagttcaaggaacagatcggtcgttttgacgttggcggtctgttctgccgtcgcgacaacgcgttctttcgtaaatttatagcagatgaaaagcgccaccgcgccgatgagcatatacacggagtagacgccgaaccaggcgtagttggctgatggatcggtatagtttcccagattgagctcaatgccgaaaaaaccggtgtccttaaggctgcgatcttttggtgaagccatctgtacaaacatcggaaacagggtataaacaagaagattggcgctattggccagcatcattcgggtactggtgagtttatcaatcgattccggatcccgggtcagggatgcattaagcgaaccataaggaatattcactacggaataaactaaatccagagccaaataaacgatgaaggcaaaaggtaccgaacctctgaccccaggaatgggagcaaaaagtaaagcggaaaggatcaccagcggtacgccggctcttaacagccaggggcgatatttacctgcttttgacgttcttttgtcaacatacgtgccgaccatcggatcccaaaagacattgatgattcggacaaaaagaaatataaaccctgccgttgccgtgctgatggtattaaccgtcagcatgtgaagagccagaaagccgcctattgtgccaaaaaccaggttttgagcgaagtcgcccataccataaccaatacgttctccacgcgttaatttatgatattcatcatggcggctttgcattatgtttttactcattctgagcagactccggtgtgttgtgtggatgtgtaacaatttctgacataaatgatctcgaagaatctattacgtttttaaattaatttattatgtttttttacttctgtgatcatcgaagcaaagcctcctccagaccctccatttcacttgttgattaacgcgttacaagctataccccggtagatttaaaacgccgccaaaccggcattttgttttattgttttttttactctggccactccaggaaatgtactctacagagttatccgcgcgctgagtaaatggcgcgaatatttgcgagatggctcacgtttgagcattttcttaatcacggagtgaaataacgtaattgagcaaccggccaggagaatacaggatgtgtcacagttgttaatttttcgcttcataaattatgggattcatcatgccatcttgtgctgagcggggcgctgccaacagtttgactcacccatgcgacggtgccggggcggcggttggcggcggccggaccctgtgtcccggggatgcagggcaaagcgttagcgccctgaacgctacccaccgtctggggggcaaaacgtgatgctgtgagtagggaggacgtcgccatcgttttaaaccacggcgttaatttcggcgtatgccccagcgcattcaatgaattcactgctggccgggggaactatccaaagtgataattcacccgggctgcgctaattcttaaataacaactatggagatcggataaccctaatagtgtaaagcctctgttgacgtacaaaataaaaattaaattgttcttatgatagcgacatattctgattgcccagaatgggattgttattatctgaataaaactaacctatattgagataattatgacaatgataaaaaaacttccattacccatggcggttatcgccgcgcttttcccatttacctctgcagtcgcccaagagttcactcaggaacagatcgacgccattgtggcgaaagccgtcgataaagccctggccgaacgccaggcgaaaatcgacgccgcggctgataaaaaagtggatgttatcaccaacccgcagaccaccgcggccacgccggatatggcgatccccttcggcctgaagttcagcggctacgcccgctacggcgcgcagttccagaccggcgatcagaagtttgtcggcgtcgatggctcctataacggcgcctcggcgatcggccgtttaggcaacgaaggcaacggcggcgaattccagataaccaaagccttcaggagcagtaaaggcgctatctgggatatcaacgtcatgtttgaccactggagcgatgaagttaacctgaaaaaagcctacgtcggcgtcaccaacgtgctcgagtctaaccccaacgcctatatctgggccggccgcgacttccatcagcgcccgcagcaggggatcaacgactacttctggatgaaccacgacggccagggcgccggggtgaagaactttgatatcggcggcgtgcagtttgacgtggcgggagtgtcgcaggtggagtcctgtagcccggaagtgatggcggacgaggccaacccgtcgcgcatcacctgtaccggcggctccggtaccggcgataacggccactacgccctgaccaccaaaacccacaacatcaaggccgggccgatcgacgttgaggtgtacgccaactacggtttcgattcgaaagcggtggacagcgacgaacgtctcgacgcctggcagggcgggctggtgctgagccacaccaacgacagcggcgtcaataaagtgatcctgcgctactccgataactcggataacagcgtctacaacaaaaccgatgacctgaccgcgatttacgccagctttgaagggctgcataaattcacccggcaggcgcagatcgaatatctgctggccttccacgactatgacaacggcaaggacaacaccgataaccgtaaaaactacggcgctattgtccgtccgatgtacttctggaacgatgtgcactccacctggctggaagcgggctaccagcgcgtcgattacgaccagggcggcgataaccacggctggaagctgacgctgtcgcagaacatcgccatcggtatggggccggagttccgcccgatgctgcgcttctacgtgaccggcggccaggtggataacaagcgcaccgcgaaggttaacggcaccaaagacgagcagctggattcgttaaaccttggcggcatgtttgaagcgtggttctagaagccgatggatccaacaacgaagaggctggcgtgcgccagcctcttcgcgcgttcagctatctcaatgcaccgtcaggcgcagggccaggtcctgcgggtagggatcaaagtagttctgcgcctgcagatagcgatccgggtattcggccagatagtgcttaagcagcgttaacggcgcaaggataggcagcagcccggagcgatagttaaggatcacctcccgcagctcgccgcgctggcggctgtttagctggttacgaaagtagccctgaatatgcatcagcacgttggtgtggtttttacgcgaggcgggctgtttcaggatcgtcatcagtttttcgcggtagatcgcaaagaaagcctccagatcctgccattcgtggagcgaggcaacgaatgggccaatctcgcggtatcccgcctgatggtgggccagcagctgcagtttatagcggctatggaaatccagcagcgcgcggcgcgtcaggccatttttgtgcagacagttaagctcgtgcagggcgaagacccgttcgacaaaattttcacgcagcaccggatcgtgcaggcggccatcttcttccaccggcagccacggatatttctccatcagcgcggcggtaaacaaccctgtgccttcttttcgtccgcgattgcccttttcatcgtacagccgcacgcgctccatgccgcagctgggcgatttggcgcagacgataaatcccgatagctcgcccagggtcgagaggtgggcgctggcgaaatcggccatcttctccgtcacgtcgtcgtgcggtgcatgcgtgaagcgcatgcggatttccccttcggtcgtttgcaccagccgcagcgccgggcgcgggacggggaggccgatagccatctccgggcagacgggtttaaacgccacccactgcgccagctcgtccatcacgaagcccatgcgcttatgcccgccgtcgaatcgtacggcagaaccggtcaaacatccgctgatcccaatgacaggttgtgtgttcatggcgtagtcctcttttattgtgcggttcgggtgaagaaaagggtcacggtggcgacggtaatgccaaatttcttcatctcggttttgttgaacaggtgcgcgtcgtcctgcaggaacatccagtcgtcgaagtgcaggagccaggtgctaccgctggccgtcacgttcatgctgtagcgccagtgaaaagcgttgcccgccgcctggccggtcgccacgccggcaatgtcgccggcggtgccttcataacggtggtcgccggtgcggcgaatgcgccatacccgctgctgcttttcgccatcatcgtaaataaagcgttcgtggagcgtcagcgtgtcgccaacaacgtcgccgtcaatggcgacatggaagcggcgcagctgtttgccgttgcgatcctgaaccatcccccaggcttccgttttgccctgaaagtagtggaaaatgtccagcgccggctgctgctggcggtagtcggtcacttcggcgctgcagcccgccagcgccagcatcagcagcgcgaggccaagggtcagaatgcgtttcatgatgttcgctccgcggtaagctgcacaacgctgatggtgcgggcgttaaacccggcttcgcagtagccgaagtagtagagccacatgcggcggaagcgatcgtcaaagccgagcttctcaatatcctgccaggcgtggataaatcgctgccgccagtgggccagggtgcgggcgtagtccggccccatatcgaacagatcgcgcaccacaaaatcggtgtgccgcgtcatcagctcgttcatcgccgtgatgctgggcaaaaatccgccggggaagatgtagcgctgaataaaatccacgtttttgctgtagccgcgatagcgctgatcctggatggtaatggcctggatagccattctgccgcccgggcgcagccgcgcctggcaggtgcgaaagaaagccggcagatagcgttgccccacggcttcaatcatctccaccgacagcagcttgtcgtactggccggtcagatcgcggtaatcgcagagcagtacctcgacgcgatcctgcagcccggcgcgggcaattcgcgcgttggcccactggaactgttcctgcgacagggtggtggtggtgacccggcagccgtagtggcgggcggcgtattcggccatcgccccccagccggtgccaatctccaggagatgatcgccgggcgtaagcgccagacgctcgcaaaggcgcgccattttggcccgctgggcctgggtgagatcctggccgtcgtcggtaaacagcgcgctggagtaaagcagctcgtcgtcaaggaagtgggcgtaaaagtcgttgcccagatcgtaatgggcggcgatatttgccttcgcctgcgcgcgcgagttgcggcgcgtccagtggcgcagccgctcgacgggcttgctcagcagccggaagccgcgctccagccgctccagtacctggccgttacgtgccaggatctgcagcagcggcgtcaactgctggctctcccattcgccgtccatccaggcctccgcggcggcgaggctgcctccggtcagtaaacgccggtagacgcccgaggagagcacgtgcacctcggcgcgcagcgcggcggcggggtcgccaaaatgaaaggtctgcgccccttcgcgtacggtgagcgccccttcgcgaatgccgctcaacagacgaaagagcaaccagcgcgcgatacgcacgttgcgcgggatatcgggttcaagcgcaaagacaggatcggtcatgagcgttcactcctgctgacaggatggttgtacagcggcacgcgcttgagccatagccgcagcgcctgccagtagatcgcgaggacggttttcagcgtcatcagcggaatgcgcagcagcagcccgcgcaggctggcccgcgttaaaggcgcgcggctcagggccagcgtggcgtcgaagactttcgcggcctgatggttctcgatatgcatgtgcagcgttttaccgggactgttaaagcgccagaggtagaccatatccatcgggttaaacggcgagacgtgaaaggctttcgccagcgggcgcgcccgttgaccgtctaccgcgtagtaatggcgctcattccacggcgtgttgcgcacttcggccagcacccagcgcagggtaccggcgccgtcgtagcagtagtaaaagttgaccgggttaaaatgaaagcccaggtagcgcagttgggtcagcagcatgacgcggccatccgggcgcgcgccggtcaggctttccagccggttcagaacctgcgctttcagcggcgtgcccagcggataatccgcatcgtaaaaagaggcggcagcaaagcgattgcggcggatacccgcttcgccgagccgatccagctcatccagatcgagccaggccataaagatgcgatagcgaaagtggtgcgctttcggctgaagacggcggtggcgtaatacgccctgatagaggcagctgttcatgtcagaggttctccgccgcgatgatgccgttgaccacatcgagggcgctgcgcacgccatcttcatgaaaaccgttgtaccagtacgcgccgcagaaccagcttcgctggcggccgttaatctcctcgcgccgcatctgggcggaccagctttggggattaaatagcgggtgttcatagaccatacgcttccagacgaagcgcgggtccaccggcgttggcgaattgagggtgacgcagaacagcggggcgtcggcaggcaggccctggagaatattcatgttataggtgacgcaggcgctggcctgatcctgttcgctcaggcgatagttccagctggcccaggcgcgcttgcgcaccggcagccagcggggatcgctgtgcaggaccacctcgtttcgctgccagccgatatcccccagtatttcgcgttcggcgagcgtcgggtccgccagcatggccagcgcttcggcagagtggcaggcgaagatcgcctgatcgaagtgctgctcccccgatgccagctggagcgtgacgccatcctgatgacggatcacgttctgcaccggcgcattgaggcgcaggcgcaggcgatcgccggaccgggcaagcagggcgcgcacgtattcgcgcgagccgccgggcaccacgtaccactgcgggcgctggcggatatccagcaggccgtgattatcaaagaagcgcaagaacagcgccagcgggaagcggcgcatctcctgcagcgacgaagaccagatagcggcccccatcggcaggatatagtggcgtgcgaaaaaggggctaaaacggtgccgctcaaggaaggtctgcagcgtggcgcccgggtcgaacgctcccgccagagcctgcttcgccaggcgattaaagcggacgatctccgtcagcaacccccagaaggccggctttagcagattgcgccgctgggcgaaaagcgagctcaggctgtggccgttatactccagcccgctttgcggattgtggaccgaaaagctcatctgcgttttttggccgctcagcccaagctcgttaagcaggcccataaagcgcggataggtgcgatcgttatacacgatgaatccggtatcgatggcccaggtaccctgcggcgtggcgatatccaccgtggcggtatgcccccccggcgtggacgccgcttcgaacagggtcacttcgtgttgcccggcaaggcgccaggcgcaggtcagcccggcaatgccgctgccaataatcgcgattttcatggacgcaccatcctgcgcaatagcctgcgctgaagtccttcaggaagcccggccagcaggcgcagaagcaggcaaaagcccgtcgggaaggcgatacgatcgtgccctttcgccaggccgcggcgaatcgctttaaccgcctgctccacgctcacctggccgggcatagaaaaatcgtttttacgcgtcagcggagtgtcaacaaaccccggcgaaacgaccgtgacggcgatccctcttggctcccagtccaggcgcagactgttggcaaaccaggtcagcgccgctttcgaggcgccataggcttcggcccgaggaaagggtagccagtgcgccatcgagctcaccagcaccacgcgattcccggctgacagctgcgactgaagcgccgccaggcagttcaccggcccgagaaagttagtggtgatgaccctttcaaccagcccggcatccaccgttccgtgttcgagatattcgcaggtcccggcgcagagaatgatcagatcggcgcggcagtcagcgagcgtctggcgacaggcatccctgtccgtcatatcgaaagagcggacgctgatgtggggactgtgctgctgtagcgccgacagacgcgacggatcgcggccgcaggcgataacccggtggccgtccgcagcgaaggacctggcgagcccggcgccaatgccggagctggagccggtgatgagcaccgtcatcatgaccgcaccctccgtttagcgccgcgcaccgcccagcccagcaggggaaggtgttcgtacagcatctccccggcgtcgtagtagtcacgctggtgaataattcgttcgtcttcaacggtgaccaccgagcagcccgcaagctgtagcgccttacccccggcaagtcgcggatgcgaccagtgcatggtccaggcgacggcaaaacgttgaccttcgcagagcggggcatcgagggtgaaacggcaatgatcgacgttggccagcaggtgcgaaagataactctggatcgcggacagcccctggtgttggccaaaaggatcgatcagcagcgcattcgtgtggtacagcgcggccagcgccgaaggcggctgggtatccagcgtggcgtagtacgtactaaaacggctaatgacggatggcgagggactcataggtcacttcctgagtaaacaatatggcatagttaaaacttacacaattaatattatttgtccaagttttgactaaaatattttttattttcattgattatcagttggttaataacatgtctttgaagcatgattttgtgggtgttggagagaaaagaagagtctgcgggcttgtgcgaaaaaagaagaggggcaattctgagggacctgctcgttgcgccacggagcggtggcgcacgcagttagagcgcaacaatctccagagagacaacctgttgctgccagcgttcaacctgtttctgccgggctgcagagagtttaccggtcgtcaccagcagccatttgcgatccggcaggatctccggcgccagggtcgcggggggcgagggaaggatgtcgatgcggtggccctgaccggtgcgtttgagcgcttcgagccagatttcgcaggcgtccgtcaggtgccagccggtgatcagatagttatcgccgggcgcctttttgtccccttcgaggcaaaaagaggtgtaggcgataatgatgccgtcgaggatttcgcgcagcgtcatgatggccggtacgttggcggaaacctggctacgcagcgggcgcagcacttcggtgaccagctcggggcggggggattcacgaccggcgtcgtaaatcagctggcgcagggattcgattttcccctctttaagccgctggagcatgttctcctgcaaggtgatccagttattcgtccgccgtgcgccagggcgcgccagcaggggctttacctggctgacaggtacccctttttttacccagtcgaggattttaagcgcctgctggatatcgtcatcgttatacaggcgatggccgccatcggtacgctgtggtttaagcaggccgtagcgacgctgccaggcgcggagcgtcgtcgcgtttatgccgcaaagctgcgcaaattctccgatggagtaggtcataaggtacacctgataatcaacaatactctcaataatatactacgaatagctgcgggttgagtgcattccacgcgtttgcaaaccgttagcctcgccggaacttagtgaaaagaaaaaggagagaacaaataaatcgccaccatccctgagaggctgacgatcgtgctgatgatgaatcgggttctgaacggctgcttttgcgttttgtggcggaacagctgttggccggctatcgcgccagcccagccgcccagcaccccgaacgccagcaatgtggcttccggtactctgcgccaggccctgcgcgccgccattttatccacgccgtagatcgccagggtcagcgcgttgaccagcaggagccaggtagcaaagggccaggcggtaaaaatgctgccgaccgctgcgaaaatcaggagcaaataacaacatcgattgagatttatcatatgagccgcggttatttttagcgtgtatcgaagccgcattatacgcattacccgcggcgagaaaaatccgctgcccgcttcggatggcgtgagcttattgcgtcatttgccggctggtgtacaacgtcatcccgaccgcggcaagaagcagtatgccgcttaagccaaacgcgctttgccaccccaggcggtcaaataccaaaccgcccgtcgtcgaacccagcgcgatcgacagctgaataacggcaaccatcagaccgcctcccgcttcggcgtcgtcgggcagcgtccgcgcgatccatgtccaccaaccggttggcgccgcggtcgccagcatcccccacaggcttaacagcacggcaacggtccaggcgtggtgtcctaccagaagcaacgtgccggcgatgagggccatcaacaaagggatggtcattaaggtctgataaaaccgggcgttgaggagtgtcgaaacgcccagggtgccgataaaacccgcgatgccgatagcgagcaaaatcagggacaggccagaggcgctgacgccggtcaccgcttccagaaacggccgcacgtaggtaaataaggcaaactgccccataaagaagagtccgcaggccagcagaccgatcgcgacgatggaatgtctgagcaggcgaagcacggagccgcgcggccggctcgctttatcgctttccatcgcaggcaggctgaagcattgccagatgaacgcgactatcgccagcggcacgaggcagaaaaaggcgccgcgccagccgacggtggcccccagatagctgccaagcggcgcggccacgacggtcgccagcgcgttgccgccgttgaaaatcgccagcgcgcggggaacctggtgcgcggggaccagcctgatggcggtggccgccgacatcgaccagaatcccccgataacgatgccaatcagggctcttcccgccatatagatcgcatagctgtgggccagcgcgacaatcattcccgagaccgccatcagaaccgtcagccccagcagaaggtgtttacgattcagacttccggcaaggttagagatagtcaggctggtcagcaccgccagggcgccggaaatcgcaatgccctggcctgccagcccctcggtgatgtttagctctccggcgatcggcgtcagcaggctgaccggcagaaattcggaagcgatgaggacaaaaacgcacagcgtcatggcaaagacgccgccccaatgggcgtgcggttgagggtgtggtgtacgacgactcagtgtggacatgataggggtatctctttatttttccggccagattcgggtgcggctggagcggacgctattcattgaataacgactaaagcgtgggtaaacgtcatgcgcgggcgagggcaagccgcccgcgacgatcgggcggctttcggccgttatctcaggttggttttgaaaaactgttcaaatctggcaaacgggattttaccggccgcattgtcatagagatcgacatggttcgcgccggggacgatcaccagctctttctctttgctgccgatggccttaaaggcgtcttcggcaaaatagcgtgagtgggctttttctccggtcacgatcagcgtcgggatagtgacttcactggcatagctcagcagcggcatattcataaacgacagcggcatggttgcattccacgcgccggttgagttcacggagcgggcgtggaaaccgcgcggcatccggtaatagtcaaagaactctttcaaaaccgggttcgggttggccggtaaggtttccggcagaatacgatcgcctgcgctgacgtgacctttctgatcgacataaatatcatgcccgcccggcgcgaatgtgccgctttccgcatccttccagcgctgcgcgttcagatactgcaagacggcgcggcgatcggcggtagtatagcggtctttaccgtcgccaacgccgtggcccatcgcgcggctcatgtcgtacatgacgctggtggccaccgctttcacccgggtatccatcgcggcgtcgttcagcgccatgccgccccagccgcagatgccgagcaggccaattcggttgcggtccacctcgttttgcaatcctaagaaatccaccgccgcgctgaaatcctcggtgttgatatccggagaggcgacgttacgcggatggccgccgctttcccccgtataagaaggatcgaaggcgagggtgacaaaaccctgttccgccagggtctgcgcatacagaccgctggactgctctttcaccgcgccgaaggggccgctgactgcaatcgccgccagcttgcgctcgccgcgatctttcggaatgtagagatcgccgaccagggtgatcccatagcggttctggaaggtcaccttacggtgagtgactttcgcgctttccgcgaaggttttgtcccatttttcgaccagcgaaacgggcgcgtttggattggttgtcccggcatagctcatggtggtgactccacttagtgacgcgcatagcagcatggcaggcatggcggccgtcaattttctggtaaacgctttcattaatcattcccctaaaacaggttccagatacaggtttcatacggacaacgctgctgtgctttgttgcaatgcgctgattatagttagcagtcagagtgctgattagcgggtgaaaagtgctaagattcatatcatattgttataaattacggcgcaggcgcgggaggaatcatggcaaaacgggaaaactataacgatctgtacctgtttatgctggtggtgcgggagggcagttttaccgccgcggcgcagcggcttgggctggcgcaatccggcgtcagccgtgcggtacgtgaacttgaagaaaggctgggggtacagcttctggtgcgtaccacccgtaaactctcgctcacccaggccggcgagcagctctatcgaaccgttgaatctggctttgatgcgttagattcagggctttccactctggcgtattatcgcaacaccccctccggtaccgtccgcatcaatgccagccagcacgccattgataaagtgcttctgccaaagctttcggtgttcaaacaacgctatcccgatatccggctggaactcatcagtgaaagccggtttgtcgatattatcgcggagcgatttgatgccggggtgcgtctggggccggaagtcggcggcggtatggtcgcggtgcgcatttcacccgatatggagatggtcgttgtcggcacgcccgagcattttcgccgctacggttttccgcaaacgccggcggacctggtggttcatccctgtatcgcgtaccagtttggcgacgggactatttatgcatgggagctcaatcaggacggtaaaaaaatcacccaccggccgcagggacagtgggcctttgccgacagctatatggaagcgaaggccgcccggctggggttggggctggcctatgtcccgcaggaactggttgccgatgacttagagcgaggcgcgcttatcagagtcctgcagcgttacagccagcggctggaaggctcttttctctattatccccatcgtaatgtgtcgcccgcgctgcgggcggtgatagacacgctgagaatctgagcaagcaggacccagagtcgggcgcggatcgttgaccgggtttaaggtagtaaccgcatgcatttatcaatcattgtggttttgcgcggggatgagtgccttaatcccgtttttcacaataagctttctaaccactcggtaaatacccgcactttgcgtgagagatggcggtgcggatacaggagtgacaatttgcgatcgggggtagggttgtcaggtaagacttccactaacaggccgcgatcgagataaggctgtaaaaaaacgttcattccctggactaatcccagccctgccaggcctgccgataaataggtttcagagttatcgatgaccagcttgccgggaagcgtcatttcaactgttccttctggcgtagaaaacgtccacggcataatttgtcggctgctgctgttaatccagttgatggcctgatgctgctgtagatcctccagcgtttgcggcacaccgtggctggcaatataggacgggctggcgcaggtcgtcattttaatattgcttaacttacgggcgatatagtccccgtcgtccagttcccccacccgcagtaagcaatcaagaccatcgcgcagcatatcccggcggaggtctgagctactgaggatgatttcgacgccagggtgctggcgataaaaatcaggcagatgggggacgaccaataacgtcgcaaaagcgacgggcatatccacgtgaagctggccgcgcaatacgctatcgctcccaaacgactccagcagcgcatctgcctgggccagtaaaggtttactctgccgataaaacgcttcgccgtcaggcgtcaggttgatgcgccgcgttgttcgctgcatcaaacgcgtgccgcagtgctgctcaagcagctgcaatgccttagtgacggcaggacgatgaatctgcaggttctccgctgcctgagtaaagctaccggactcgacaatttcaataaaaatgcgaatcgattcaaagaggtttatttgcatagcgggcttcttttgccggatcgggatatcatattgttactgattttataatagtgatgcactttttcggctatttttctaaataatataacgtcctacactccttccatcatgaaactgaaccgctccatagcgctattgtgaaggatattaccccatgaaaaataaccgaatctgccagatcctgaatatagaaaaacctgttattcaggggccgttatcgtggttgaccgatgcccgtttagtcgccgctgtcagcaatgccggcgggcttggtgtgctggggccgaatgccggtttaaccgctgagaccgcggtgtccacgccggaagaaaccgccgaaaaaatgcgtgaagagatccgcaaaaccaaacggctgaccgaaaaacctttcggcgtgaacctgatccccgctgctgaaaacgatatctggaccccgcctattttgcaggtgataaaagaagagggcgtcagagccgtggtgtataccggctacggtgaaggagcgctcataccggcgctgttcaacgaattaaaagaggcgggcattgctatcatctatcgcgatattaacccgacgcctgaaaatacccgccttgctgaagaagcgggcgccgatatcatcgtcgcgaccggctttgatgagggaggtacattgccggggaccgcgctgggaaccttttctatcgtgccgctgatcgccgatgcggtgaagcgtgttccggtgatggccgcgggcggtattaccgacaagcgcaccgccagagcggcgcacgcgctcggcgctgaagggatatttgccggttcggtttttatcgcgacggaagaaagcagagtgccgcggtcggtcaaaaataaaattattgccgccagtggcctggatttgctgcttttccgcacgctgccccattactatcgctctctgccgggcagactggccgaaaaactggtggcgatggataaagccggcgccagcaacgaggcgctcggtgaagcaatggggggattacgcggcctgcgcgtcggcatgctggaaggcaatgccgatgagggctatatcgcgctcggcacgggtatcggcagcatccgcagcgtcaaaagcgtagcggaagtggtcgacgcgttaaccgtgagttagcgctccccaagagacgcaggccgttcagctaaatcatccgcttgttagcgtgtctgactgagaataatacggtcgaatagacggtcgcccagccagacgcgcagacagataagcatttttgcaaacttacctgcggcatagcgcgtacgtgggttcttactgttaatggcgcttgaaacgacatccgcgataaccttcggatcgctgcctgtcccgtgcccgtaagtttttttgatcgacgcggccaccattttcaccagttggccataggggccactgtgtgaacgtttgacgatgctttcgctggcagcatcaccgaagcctgtctctatcacccccggctcgacgatcgtgaccttaatcccaaatccggcgacctccaggcgcaggcagtctgaccatccttcgagcgcgtgttttgtggcgtggtaccaggcaccaaggatgctgtacatcttccctcccatcgaggagatgttgacaatatgcccgctacgtctggcccgcattgcagggagcagtagctgcgtcagccgtgcggcaccaaagaggttaacctcaaattgatagcgtgcttcatcaataccgatctcttctacgggtccatacaggccaaagcctgcattattgatcaggacatccactcccccggtttgcgacagaatggcgtttacacaggagacaatctcctcatccctggctatatccatccgtaacggctgtgcgccaagttcggccagatcggccattttatcgatgctacgggcggcaacatatacctggtaaccatcctgaatcaggcgacgggcaatagctttacccatccctgacgatgcgccggtgaccagcgcggttttcttttccggagcgaacataaggacctcgtttcatggactggctacagtttgcctgcagacagactcttttcatctggccttatgcgccagtacgcttgctaacggcgccattcgcttcagatcagaaaggaagccgccttctgtggaaacgacaggaggtaacgcgattcttatggcaagtcggtgcttaacaaccgcgtcatctcgtttgtttaacctgaggagctctttccattaagacgcatgctccctctgacggtttccggcgtctgtccggtccaggccataaatgcgcgatagaaggagtttggatcttcaaagccaagcaggaatgcaatctcatagccggagagatgggtatgactcagatagtgccgcgccaggttctcccggcaaagattgaccaatgtacgaaaatttcctccctcactttcaagtctgcgctgaagcgtacgtttgctcataccgagacgctccgccgttttctcaatggtggcttcgttaccgggaagaagctcaagaagtaccgcctgtacgcgttcagttgttgaggccatttcatctaacgtgctgagacggcggcgcagctctggttcaaatatttgccacattccttcgttcaccgttaaaaacgggcggagggcatcagcggcggaaaagctgatggccggtttttctccatacgctacggcggtaccgaaaaagcgggtaaggtggccgtcctgtattctggcgggaagctgagggagcgtgactttcactgctgtgaccggttcgcgagtggcaagttttagcagccgcagtaagaaagcaagttctgctatctgcagggacggaggaatgtttgtcgctgacagccagcacggtgaaacggtaaggatgccgctgtgttctacgactatttccagaaccattggggcaatgagttgcttatatctggccagtcgctgaaccgcctgcatcatgttggtgctgcatagtgcggcgaaaagcgggggatcaaagacttcagcagagaccctttctaccagtggtaagggaaaagcaggatcgtttgtttctacctcaagggcgcgccagaaacgaatatactcctcgatattaaggccgcgctctgtcctcgaaaacgtgtcgtcgggcaatcctgctttgcgcagtagatgttgaggctctaaacccgcatcttttagcagcgccttccagccgatattgagagagaaagtccggttatgtgccattgtcaggtttccgcaggatgagtgttgtcagggagcgaatcttttcccggagaagagcataacgtttcaatcctggcggtaacattcataaagcgccacaattgtggcaaatcacgccaaatgagaggcggctgtacaccttcccggagtcatcggatcatccctgggcggcctctccagcctgggccctggattcattcgcgttaccagctcgccagctggcgaaatcgtggcgtgaaaataaagcttgctatcaatcgccatctgtgtgatcaatagcaagttgatttactacacagatgcggtaataaacggtttagcgaagcagttctcatctcaagcgttatccacagataatccttctttagactctccttatcgtgattaattaagctctgtgacgcgaataatgttaaagttttttgaacctgcgacaacgatgacggtctaaacccgagtagacaggctcagaagctggcgcaaacggtgataatgaaggaaagtccttgtatctcccgtttagcgtgaaaagtgcataagagatagcgttatcccaaagcacacgattattttattgaaatctaccgaacattacgtgccctcgggcaaactaagaaattaacaacattaaaaaatcgctggtgcagtaatagagttcagtctgaagtgcgcttcagatgtttctataagaagtaatgacaatgatgtcattgttattctcaaccattcagagcagcatttttacgctgtgacagaaaagccgggaaggcgttttctgtgaaatatggctaaatgtccctgcggtagagaatgttgtagcaaaaagaggctaacatcatgattgaccacattcatttcagatgcccatgctgtcatgggtcacagtacagaacatccacctacgatgtttctgaaaaaaatccgtttggcgcgaaatgcattttttgtaaatccgcaatgattacatttgataacatcgcaccgcatatttccagaaactcggcatcgctggcgttacggaagtaagaaaaggccccgaaaagggcctttgatatctgaaaataccctaaataattcgagttgcttaaaggcggccagggcgtgagcttcaagaagcatagataacgccttatccaggcggcccgtaagggcgagactcatggatgaaccgagtaacaaagccaacacataagccgcttgaagtatgacgggtatagtaagcattattaccattttgatcgggctgcctgcgggcagctttttagtttgtttaaatttaaatcacgccgtacttttcttctctttgccgatgtgcgtcaatgcgcagctacgcaattcttacggaaatcttgttgcgttctataattcttaaaccagaactaatcaggtatttctatgcatatcctaccgcccgtccgtccggaagagagtatccagcgcttaacggcgctcctgacgccaattgctgaaaaaatggtcgttgtgccgcggaaacgcatgacctggacgcataaaaatcaaccgcagttgttccttttccttgacggcgagctctccatactccgggcctcggacggtctgttgattgtcacggtttaccacccacacctgtttggtattgccgagatgatccagccggtacgcggccatcagctgcgtgcggaaaccgaatcgacaatactgcgcgttgatgcgcaaaaagcgatggaagcctttcgccagcgcggcgtttgggaagacgtcgcctcactgttgtcgtaccacacggcttatcttttctatcgcgacgcgctcgtcgtacagcagcgaacctacgccgttatccgcaatcatttgcaggaaatgggccagctacccgaagagacccggatgcgggtctctatcctggattatatccaggaacgtacgcacttatctcgcagcagtgtattaaacgtgttgtcggcgttaaaaagtggtaattatattgcttttaaacggggagggtatttgacgggggtgaataaattacccgagcgtttttagcgctggcagtttgtccaaaattaaataataaaacgattatcagcgcgacgctaatattctattgtaggcccacttaacttttgacgaggacatttattcgacaacgggtcgacaatgggatgattatgaagaagacgcttattacgttaattattgctcatacttttacggcgactgccgcttttgctgctgcggagactggaacctggtacgcggggtctaaatttggctggtcgcactacggcgactccagcaccgatcggcaagtcgatgttgaccgcgataacgtcggcggcggtgtgtttaccggctatcagattaacccctggctggcggttgaaggtggatatgactatttagggaatatgggcatcaatggtcgccatggcgcagccggttcgcaaatgaaaagtcaggggctacagctttcgttgaaggccagctacagcctgaccagcgactgggatctgtacggccgggccggcctgatgggctaccgtgcggaatccgatgtgaatggaaaaaatcgatttgatacgggcgtgcgtccggtgctggctttcggtaccgaatatgcctttaatgacagatggtcggggcgcctggagtaccagtgggtcaacaatgtgggtaacgaaaaccaaattggcgtgagcagcgatgtgagctccgtgatggccggcattagttaccgctttgggcaataaacgcatcgtacgggaagagtctcctttgaataaaaggggctctttatctgctaatggtatacctatggtcataattacagtatagaactggtagccacaggacccgataaagtgtgatcgtgatcaacattgataatcgccaatgcctttaaatatgatacagggaaaataaatgtaatatattaatggtgattttatggcaattaaggatttttttaaacagaccacacctggacgccgtcgttatggcgtagcgttatttgtcggggtagtggcagggattatgtcggcatttgttaaatggggcgctgaagttcctttaccgccgcgtactttctccggtggcagagatgaatttaacccaccttatcttttcttacgcgactatctgggcattgacccgacgcatacggtttatactttttccgaacacatcatcaatccggtgatggttacgcatattatattctcattggtatttgccgttggctattgtgtcgtcgcggaggtctttccgaaagttaaattatggcagggggtatgggccgggattgtcgcaactatcgccgtacactggatttcctttccgttactgggcctgaccccctctttattgaatattcctgccgatgaatatatttcggaactggtggggcatattttttggttctgggccattgagatgattcgtcgcgatcttcgcaaccgcatcacccacgaaccggacgctgaagtgcctcttgacgcgccgttcagataattaatccccacagagcccgcgatctcgcgggttgtgtggggcgggacgtagagatcaggacagagatgaaggcattgtattcagcgcgaagttgaggatcttctcgccatcaaatgaggcatagggcaagctttcaatcacggcaatttcttgtggtaaatgcagtgcgctaataaattgttcaaccttatactggatatgcggcgcaaccagtacgccatcataggcaggcgcgacgctaaagaaattttcaaccccaacggcgctgattaataaatctaattgccgatcgtcagcaattttttgcattttgcgggcaataatccctgccgtttcgccaaacagacagcatattaatagttttttcacgatttaaccctcggtgagatagcgaagctacactattcctcctttactcacgaaaatgcgcgatgtatcaatatttgaggttaatttctgcggatatttttattatgacggagagcatcacagatgcgaaaaacgtatgcctctgtgatgctgtgaatggcagggatgactctcaggctacctttttttacgtgaaatcaggaagcgatcgccggctcgcgtgagcttcgttccatttgtacagtactcgatagcaaagttaaaaaattcatcagagtcgagctcgaaatccagttcgagtttaatggcgtcgccggactgcagaagctgctttgcctgttccagattgctggcttttactgttcccatctcttcacctcgttttagcgctggtggcgtccgggggctatcctacaggctttgttttacgatcgcgtgacacggcttattatttgcgctttctgccgttcgccagccgttgccatcgctatggataagccgatagcgatggtccggggttcaatctcagtcgacgttattgaagtagtcccgcgccgccgcctcaacgttctttgcctcaatgcccgttttctcggtgatggaggcaataaacggcttgaacttctccgtcatcacatgacctccgtcccaatgagcgacataaaaacggcactgataacgataaaagtggagagttttgtctcctaacgtgtaatacatatgaatctccggttcagtatgtcgggtggacaacaacaagcgatgagcaaagcacgcatcaacggattctatcctcctcccaattcgcggaaatttccagcatgccgtacaaaaccatctggaatacgtagggagaggcattctccagccccgtgctatgcaacgccttacgcaaaattcagcgcaacttcaacggcttcacgccaatctccgacaggcgacttgaaaaactcagatgaactatcgatactgtataaaaacacagtattataacggtgagtctattatgttgttctataaaccggttgagttgcgtcagatcgtgtcgattccgctgtttagcgaccttgtcccatgcggttttcccagccctgcgcaggattatattgagaagggaatcgatctcaatgagctttgtatcagccatcccgcggcaacctattttgtcatggcgacaggcacctcaatggtggatgccggtatttatgaaggtacgctgctggtggtggatcgcggcctgaaagcgaagcatggggatatcatcattgcctcagtcgacggtgaatacacggttaagcgtctttgtacgcaccccatcatgcagctcttgccgatgaacccggattttccgccaattgtgctgcgcaacgacggtgaagcgctggagatttttggcgtcgtcactttcagcatcaacaggctccgctgatgtttgccctggtcgatgtgaattcattttacgccagctgtgaaatagcctttcgccctgacttacgcgggcgtccggtggtggtgttaagcaataacgatggctgcgtcatcgccagaaaccatgaggcgaaactgctggaaattccaatgggcgcgccgtatttcaaagtgaaatcacagtttgaacgtcatcaggtagcggtgtttagcagcaactatgccctttatggcgatatgtcccatcgcgtcatgacgattctcgaagaactggcgcccgcggtgtatcaatattccattgatgaagcgttcgtaaatttgaccgggatccatcgttctgaggagcttgaggcgtttggtcgccacgtgcgtagtacattactccagagtaccggcttgacggtaggggtggggatcgggccgacgaaaaccctggccaagctggcgaattatgcggccaaaaggtggccaaaattcgagggcgttgtcgatctctcattgccggccaggcagagaaaactgctggagaaggttgccgtcggtgaaatctggggagtggggcgacggattgcgaaaaagctcaatgacatggggattacgacggctcttcagctggccgagacgcccgcttcgctgatcagaaaacatttcagcgttgtaatggagcgcaccgtgcgggagctgagaggcgagtcgtgccttgaactggaagagtatatgccgactaaacagcaaattatctgctcgcgttcctttagtcagaaggtgattgaatacggggcgatgcgcgaagccgtctgcagccatgcggtccgcgccgccgagaagctgcgcgcggagcaccagtactgccgctatgtttcggtctttgtgaagaccagtccgttcgccggtcatgaagtctattacagcaaagacgccggcacgaaaatccacatcccgacgcaggatagccgggatatcgtcgctgcggcgctaaaatgcctggatactatctggcgggagggatgccgatatcaaaagtgcggcgtgatgctgggcgatttctttagccagggggtggcgcagttaggcctgtttgacgactatcagccgcgagcgaatagcgaacagctgatgacggtgcttgatttagttaaccgacgtgaaaaaggccagctctggtttgccgggcagggaatcgagcgcagctgggagatgaaacggcatatgctgtcgccagcctacaccacccgattcagcgatttgctgcgggtgaaactgtaggctggtatgaaagggagtggttatccggagcggcgctccggacgacaaaccgtcaaacatatcgcgcagcgcttattgcaggcccgccagttcatcggcggtcagcgctaaagtttgcgttgttccgctttcggcagactgcgctgcggcttccagtaccgccatgacggcgagcgcttctaagggcgataccgggttgctgattttgccggtcagcgcatcgcggacgtgaatatagtactgccgctgatcgcctcgtggcgcgctgatttcactggcgcgcaggttggcatcaaacaccaccaggctatcgtcgtcttcgccccagctttcgctgcccgggaccacgcccgccagcagctggctctcctgctggtcagcgcgttgtttgacgacgctacctttatcaccatggacggtaaagcgggatacgccgcccgcgaccagcatgctgcagtgcagaaccactttgtgctgcggatagttcagcaccacgtgcgcccagtcgttgatttccgcgccttcacgcagggtggcgatattgccctgcaccgactgcggcaggccgaacagctgcagcgtctggtcgatcagatgtggacctaaatcaaaccacaggccgctgcccggtacgttctgctcccgccagcggacgcgcacttccgggcggaatcggtcgaaatgggattcaaaatgtttaactttgccgatgagcccctgttcgataacctgcttcacgcccagataatcgctgtcccagcggcggttatggaataccgacagtacccgctgtttctcttccgcgagggcaatcagttcgcgagcctcctgcatatcgagggtaaagggtttgtcgacgacgacgtgcttgccggcgtgtaaagccagacgggcaagcggagcatgggttgcgttaggagaggcgataaccaccagatcgacatccggatgctggatggcctcttcaggcgatgcgatgacggtgacttctggcaggtcacgtttcactttctcttcatcacgcgaggcgacaatcgccagattcaggccgtcgacggactggatcagcggggcgtgaaaagttttgccgacgaagccgtagccaatcagggcaatattaatgttcttaccggtagtcataagcatctccgcgttattaagcatcagcgatatggagctgtattgagtcgttatccttcagttcgtcccaggggcgatcgaggaagagctgatggatgtcggcgagtccggcaaccagccagggctcgcagtgattcagtttcatatgatcggcaaccagccaatgttccgcgctggccgccagcatggcgcgcttgacttcagcatccgcctcctgactggcgctgaggccgaggtcggcgtggagcgcgcaggtgccgagaacagcgatatccgcccgatagcgttccagcagcgaaaccgtagcgctaccggcaaacaggcgctgctgcatatcccatttcccccccagcaaaataagctgaatatccgcacgggtgctgaagtgctgggcaatatctaaagagggggtgatgaccgtcattggaccctgtatctgggtggcgacggccagcacggtgctcccggcgtcaagaaacagcgtggatccgccggggatcttctccgccaccattttacctaagcgcttcttggtatccggtagcagggtgttcctgttctgccgattcatggcggagagattgagcgcgatagcgccaccgtggtttttctgggcgagcccctgtttttcgaggtcgctaagatcccggcgcagcgtatctgcagaaacctgcagtctgtctaccagctcactgatcgtgatctggcctttttcactaagtatatcaatgagatatttttgcctggccgttttatgcatcgtttgaacccgcaaaatgctgcaataacttgcataatacagcattttgcggaaaaagaaatcttcacaacgcgcggcgcggggatgagttaacgaagacttttatacgggatggctcgatcaagggctgaaatcaccgtttgaatccacgtgacgtcgaggcgataagtcgggattgcagaaaaagacaagagatgaatagtctaaaatgataccgagaaataacttgagttaatgagtgtgtttatatcaaaattcactatcagcagcgatagcgctggtttttgctagcgcttcgtcgtgagctggacttgctggcgacggtccggttggcagaaatataattcatatggatggcatgacgttttctcactatttccgtttgggttgaatgctgaaaatattaatcccggatggggcacctcgaagttaatcggtgagtggaatgcccgtcacgccagatagctattttacttaaagttcgttgagtgcccgttctcaggtcaaaaaataatgtttatgtatatcgtgttttttaaaacgacgatagctgtactgtgcgtatcgttagctatctggataatacttgatttactttcgtcagcaggctaaatcgatgttgaatattgttattaaaaataataatcagttctttaatttgggatttcattttttattgcaggcgctcttcccggaatactcattctctacacaggtcaccgcatcgcttaacgaacggctcgtgcgtgatgcagatgtcgtcgtactggatttatgccgcggggaagagttcgtatgtcatccagagttgttaaaccgtaaaccgggattgctgatcggcgtggttgccaggctaaatcatcgagggaaaggcgttttgccgctctgcttgaaggagatagtttttgttgggcgcgatgagaagctctctcaggttattgcgaaaattaaactttcatgggttctgacgcctccgtcagcaaaagaaaagctggcgctccggtgcgatagttgcccgcagagaacgctttccccgcagcagagaatcatcgcggcggcaatttatcaggggttaacggtgaacacgattgccagaaagctatcgctttgcaataaaacggtttttgcccacaagcgtcttattatgtctaaatttgatctacgcaatgatttagacctcgtactattgctgcgtcatctggataacgcacgctgggttgcgaaagataattcttaaacttgcaaaccggcaagatcgctctattcttattttgcttactaaaatggaggaaaaagcaatgtgtactaatttgcatgacaacgctcgtcaatacgcagaagagaaaaaatgaacggctcctgctagcctgccttcccgtcagcccagcgtctggcggcaggtgataatgcaggctagacaccgtattgcaaagttcatcagcaacccgccgccggcgggttctttttttcagccctcccgcttttcgccagtgaattcagcagcatgccctgattagctcttgcgtaaccgtcgcgtaaggctagactacggaaatgtgcatgagttaacggaggtccagtggacgccattaagggatcggaactgaacgtgccggatgccgtttttgcatgggtgttcgacgggcagggcggcgtaaagccgttggtcgatagtgacaccattgataaagagcatccttgttggctgcatctcaactatacccatgtggatagcgcggaatggctggcatcgacgccgctgctgcccaataacgtgcgtgacgcgctggccggggagagcactcgtccgcgagtgacgaggattggcgatggggcgttaatcacgctgcgctgcatcaatggcagtaccgatgagcgcccggaccagctggtcgcgatgcgtctttatatggatgagcgcttgattgtctccacccggcagcgcaaagtcctggcactcgacgatgtactcggcgatttgcgcgagggtaacggtccggttgacggcggcggctggctggtggaggtctgcgatgcgctgaccgatcacgccagcgagtttatcgagcagcttcacgaccggattatcgatctggaagatgatttattggatcagcaggttccgccgcgcggtttcctggcgctgttgcgtaaacagcttatcgtcatgcgccgctatatggcgccgcagcgcgatgtgtatgccagattagccagcgagcgtctgccgtggatgacggacgatcaccggcgccggatgcaggacattgccgaacgtctggggcgaggtctggatgagattgatagctgcatcgcccgcacggcgattatgagcgatgagatcgcgcagattatgcaggagtcgctatcgcgaagaacctatacgatgtcgttgatggccatggtttttctgcccagtacctttttaaccggtctctttggcgtcaacctcggcggcattcccggcaacagctggcatatgggttttgccattttctgcctaatgttagtcgttctcattgggggtgttacatggtggttgcatcgtagtaaatggctgtaaagaatcgtcttttgtcgcgatgatgatggtgaaaacccggcaatgtttgagcgaaatcaataaaccatctacccattcagggcaatatctctctcgcaggtgaatgcaacgtcaagcgatgggcgttgcgctccatattgtcttacttccttttttgaattactgcatagcacaattgattcgtacgacgccgactttaatgagtcggctttttttttgcgctctgtttctcagcttctacgcttaacgggtgtacccgcccacaaccgggagtcaatatgcgtaatgaacagctgaactcaattcccattccgccggaacctaacgatccggtaccggtccacgatcccaaacctcgcccgcgcccgttacccgatccgccgcctgacgatgagccgattaaattgtcgcatcgggagcggagatctgcgacgatacgcgccagcagattgtccgcccctaaatgtaatgcgagaaataattgtgaccgctttttcaactctgaatgttttgcccgccgcccagctaactaacctgaatgaactggggtatctttcgatgaccccggttcaggccgcggctttgccggcgattcttgcgggtaaagatgtccgcgtgcaggcaaaaaccggcagcggtaaaacggcggcattcggtctcgggctacttcagcacgttgacgcctcgctgttccagacgcagtcgctggtgctgtgtccgacccgcgagctggcggatcaggtcgccggcgagctgcgtcggctggcgcgcttcatggcgaatatcaaaattttaaccctctgcggcggccagccctttggcgcccagcgcgattcgctacagcatgcgccgcatattattgtcgctacgccggggcggttgctcgatcacctgcaaaagggcaccgtatcgttagatgccctacaaacgctggtgatggacgaagcggaccgcatgctggatatgggctttagcgatgccattgatgaagtgatccgctttgcgccggcttcgcgccagacgctgctgttttccgccacctggccggaagcgatagcggcaatcagcggccgcgtacaaaacaacccgcagactattgaaattgacgccgttgatgcactgccggctatcgagcagcagttttttgaaacctcgcaacacggcaaaatcgcgctgctgcaaaagctgttgagccagcatcagcccgcctcctgcgtggtgttctgcaacaccaaaaaggattgtcaggccgtctgcgactcgctaaacgccgccgggcaaagcgcgctatcgctgcatggcgaccttgaacagcgcgatcgcgaccagacgctggtacgctttgctaacgggagcgcgcgcgtgctggtggcgaccgatgttgctgcgcgcgggttagatatcaagtcgcttgagctggtggtgaactatgaactggcctgggatccggaggttcacgtacaccgtattggtcgtaccgcccgcgccggtgaaagcggcctggcgattagcctctgtgcgccggaagaggcgcagcgcgcaaatatccttgccgaaatgctgcaaatgaagctcaactggatgagtgggccgacgaatagcagcgttgtgccactgcaggcagagatggccacgctatgcattgatggcggcaaaaaagcgaagatgcgcgcgggcgatgtgctgggggcgttgaccggtgatatcggtcttgagggtgcagatatcggtaagatcgccgttcatccggcgcatgtctacgttgccgtgcgtcagggcgtcgcgcataaagcgtttaagcagctacaaaacgggaaaattaaaggtaaagcctgccgggttcgtttgctgaaataagcgcggaaaaggcgtctcaggcgcgtacctgagacgcaaagacgttattttacttccacaacgttcaggcgcagctcatccagctgcgcgtcatcttcttccggctgccagccggccggctgcatcggaatctcttcacgatcgaacgccagatcgccgccgtcaacgaccgcagagccgtgctgaatgcctttaaagtcgaacaggttgacgtcgctgagatgggaaggcaccacgttctgcatcgcgctaaacatcgtttcgatgcgccctggatagcgtttgtcccagtcacgaagcatgtcggcaatgacctggcgctggaggttgggctgcgagccgcacaggttgcacgggataatcggaaaacctttcgcctgggagaaacgctcaatatctttttcccggcagtaggccagcgggcgaatcacgatatgtttaccgtcatcgctcatcagcttcggcggcatccctttcatcttcccgccgtagaacatattcagaaacagagtctgcaggatgtcgtcgcggtggtggccgagggcgattttggtcgcgcccagctcagaagcggtgcggtaaagaatgccgcggcgcagacgtgagcagagcgagcaggtggttttaccttccggaattttttctttaacaataccgtaggtattttcttcaacaatcttgtattcaacgcccagctgctcaagatattccggcaggatatgctcggggaagcccggctgtttttgatcgaggttgaccgccaccagggagaaggaaattggcgcgcttttctgcaagttgcgcaaaatctccagcatggtgtagctgtctttaccgccggagaggcaaaccatgattcggtcgccttcttcaatcatattaaaatcagcgatcgcctcgccgacgttacggcgcaggcgcttctgcaatttgtcgatattgtatttttctttctttgtaacttgctgattatcaagcattataaacgttctctgaaacgaaaaggcatgtaaggggcaaagttaacatcacggtgcaagcctggcgtcaggcattgatagccgatcgccgttcatttcatccatccctgtactgtcgactttgaacaccatttattgcgttttcatgccccatctggttaacaatggttagcaccggcttacagcagccagcaggcaaaagtatgtcgcgtatggtacggattccgacgacgaatgccagcgcgttttacggcggctttccatctgctaacgatagtgcggcgaagttttggcctcaatcccccttccgggcagaaaaaaacgtcgtttataggcacgccagcgtcacatatccggtgatggacggtatctggtaaaagggtgcgagaatttattgttcgcgataatcaaaaagcgttggcaaggtacctcggtttttttaaagcaggggccttgttcctgcttttgccataatccgccaggatcgcgatataattatttgcatcctgataattacacagcgaaggtatttggcgcaggtgaataacagcggtaaagtttgagtaaaaataacctgctacagactgattccctacaacgccagagcagttgggttttttcctgataataatctgaatatgtgcctactcaatggggtttttccttgcaaaacgaagcgcttatccaatccacattcgaatttctcggattatgaataaggcaattacaaaaattgacagttgcctgatatttttatgagatttaaactttcactgcaacttatggattaactttgattatgggaataaaaatgaaaaaaagtaccgttgcagtaatgatgatagcgattttttcaggatcagcttatgccgagtcaatgcagctaagtccaaacttttctgcggaaagttttactgtatcgacgtctgcagggatgctgagtgggaaatcacaggagagagtttatgacgcggatacggggcgaaaggtcagtcaacttgactggaaaataaagaatgtcgccattgtgaaaggtgatatctcatgggatgcctactcctttttgacgctgaccgcccgaggctggacgtcgttggcttcaggctcaggacatatggatgactatgactggatgaacgataaccagtccggttggacagatcattcatctcatcccagcaccaatgtcaattatgccaatgaatacgatctcagcgtgcagggctggcttttccaggacgacaattataaagcgggcgtaattgcgggttatcaggaaacgcgtttcagctggacggctaccggaggttcttacaattatgataacggtgcgacgactggcaattttccgaccggtgagcgtgggataggatacagccagagattctccatgccctatatcggtctcgcgggtcaatatcgtatcaatgactttgagtttaatgccttgtttaaattcagtgattgggtcagagctcatgataacgacgaacactatatgcgtgaactgacctttcgcgagaaatcaactaattcgcgttattatggtacatcggttgatgccgggtattacgtcacgcctcatgccaaagtttttgctgaattcacctatagcaaatatgaagagggcaagggaggcactcagattattgacacctatagcggtgaatcagcttcaattggaggagatgctgccggcattgcgaataaaaactataccatcacagccggtcttcaatatcgattctaaatcattaccgcccgtggatatagccagcaaaactcgctaatcccggagcgcgcttaatcagtatggagtgtctcccgctctgggggcacgccattatccacggacatatcacccgaatgcttcagaggatggattgtggcaagcgcaaagggatcgcccaggaattgctaaaaaccggaggtaaacgcaaggcgcttatcctcgtgtgccggcatttcatttatctcttcgtatgctctacctgtggcgcaaaatccgccacgaacaaagatacgattcacgaatgcatcaggtaaccttcaggtaggggcgcgaaaagatgagtttgtccgggcgaagagaaggcgattgaaccgaaagggaaatgggcaggcaatgaaatgatgatgcctgccgccggcaattatttagcgcaatagacgcgcgcttcacgcggagtataaatacccagggtgacaaaacccagcaggccgttgacaaaagtctgctgcacttcagtacggactactttgtcggcgccgccgcagactttggcagcatcaatttgcttcgactggccaatgccgctgacaaagaagtggtgagtggtgacctgctgaggttgaacggtgacgccaggatttaccgagaagctctgctgggcgcaaccagaaatagcggctgcggcgaaaactaccataattaactttttcatttcatccctataattgttgtaaaacatacccatgttcgggcaaaggttttatacagcaaaatgaaaaagacacaacgtactaattttaatagtaccaggtaaattattcccctatctgcgatgctgcgggtacggcccagtgctcagattgcggaaaaaaagcccgcacagcggcgggcagagtaggtttaccgcacgaccagcaccgaacattccgcatggcggacaacggcggcggcgttagagcccagcagataggtggtgatatcgggacggtgcgaagagataatcaccagatccgcggggagagacttcgccatagcaaggattttatcttttggcgagccttccgaaacgtgtaaatggacacggtcttccggaatagtaaactttttcacaatctctttcagccgcgattccgattcggctttgaggtcatccatcgccggcagctctgcggtgtaagccattcccagcgaagcgtaatagggaagggagggaatgacggtcaggaaatgcacctcggcatcatcgattctggcttcagcttcaacatgcttgataacgcgatcggttaattctgtatcggaaatatcgatgggcacaagaatcattctgttcataaaacctcctgtttaagtaaccacttaaagtgtaggccatccagttgattattgtacattgagcgcaatcacactttcgccatcaggcacggcggcgttcagtaaattttcctttgatcacgccgtcgtaaaaacggcctttagaaaccacctggagaaagtcgcggaaaatgcgcggcgggacgccgagatactgtagggttttgttatcgcgaaaacgaatttcaagaataccggaggactcatcgtaggcgatggaatggatacgggatgatttcacgggatgatggtgcatggcgggcgtcctctacggctacggcggttcctggtagcaatataacattcatcggtcgattattttaaagcaattgatatattgttttgctttgaatgcagtcgatggccgggaggggaagtgaaagcccgccgttgccagcgggcccgcagattagaactggtaaaccaggcctaaagcaaccacgtcatcggtagagatgccgttgttggaatagaagctatcgtcttcgtccagcaggttgattttgtaatcaatgtaggtggacatattacggttgaagtaataagtcgcaccaatgtcagcatatttaaccagatctttgtcgccatcggttttgctcaaatctttacctttagacatcaggaaagagaccgccggacgcagaccaaagtcgaactgatactgcgcagtcacttcaaagttctgggttttattggcgacgccgttgccgttaccgtatggcgtcatgttgcgggtttcggaatacatggttgccaggtaaatattgttggcatcatatttcaggccggtagtccaggcttccgctttatcgccctgtgcggtagtttgggtcatctgatcgttggtacggtcagaagaggtgtaggcggcggcagcgctgatacccataccgaaatcataagaagttgacagaccaaaaccgtcgccgttggcgttacgtacgctgcgatcgccgttgttggtgccttcgccgctgccggcgttttcatttttaccctgatactgcagggcgaagttcaggccgttaaccagaccgaagaagtcattgttacggtaggtcgctacgccgttagcgcggccggtcataaagttatcggcctgggtgtaggagtcgccgccgaactctggcagcatatcggtccagccttctacgtcgtacagtacgccgtagttacggccatagtcgaatgaaccgtagttagcgaatttcagacccgcaaacgccagacgggtccaggactggttgtcggcgccttcggtgttgttcgcctgaacgttatattcccactgaccgtagccggtcagctgatcgttaatctgagtttcgcctttgaagccaagacggacgtaggattgatcgccatctttagaggaatcatcggagaaataatgcagaccatctaccttgccatagaggtccagtttatttccgtctttattataaatctcagcagagtgagcagcgccagcagctaacaatgccgggataacgagggccagtacttttcttttcatttagacaatcctttaacggtttttgttttagcttcctcctgggaagtgaactcatgctaaatgagcaaattaagatatggtaaatatcaattgttacgatatgagtaaaatctaaaataaataattcaactgaaatggtgataattataatgaatgattttgtgaaatacatacaaaataaaaattatacacggtgattttaatatcgtattatccgcccgttatatgccttttattgtcatctaagaatttatgttgccctccgttcctgagaatggtttttattgagcggtaaaatgacaagcccgaatgaatattcgggctttttttatgagtgactaaaaaaacgtcagtaaattagctttcggttgccggtttttccaccttaccggccagctgggcaaggaagtcatagcgtttttgtaaatccgccgtcgcatccttccacagctgttccgcgacttccggctgctgcgcgttaaggcggcggaagcgctgctcgttcaggagcgtttctgccagcgcgtctgacggcggacgggagtccagcgccagcggaagtttaccttcatcggcgcgacgcgggtcaaagcgatacagcggccagaatccggtcgcggtcagctgacgcatctgatcgtggctcagcgccagatcgtaaccgtgttcttcgcaagggctgtaggcaataatcagcgacggacccggatacgcttccgcttcctgaatcgcttttaccgtctggtttagctgcgcgccaagggaaatctgcgcgacgtaaacgtggccgtacatcatcatgctgacgccgaggtctttgcgcgccttgcgcttaccgtgttcgccaaacttggtgaccgcccccagcggggtggcttttgatgcctggccgccggtgttggaatagcattgggtatcgagcaccagaatattgacgttttcgctcaggctcagcacatggtcaagaccgccgaagccgatatcgtaggcccagccatcgccaccgattagccagatcgatttctcgaccagcgcgtcggcgtcggttagcagctctttcgcgtcggcttcatttgccagaaccttacgcagctcggccacctgttcgcggcgtacttcaggcgttgcttccgcgtgcagcgcgtcgttaagcgcgggcggaagtttatcggcgaactgcgacagcagacgcattacgcgctgacggtgctgatcgacggtgaggcggaaaccgagaccaaactcggcgttatcctcgaacagcgagttagcccacgccggcccgcggccgttggcatcggtggtgtagggcgtggaaggcaggttgccgccgtaaatcgatgaacagccggtggcgttggcaatcagcatccggtcgccgtagagctgagtcagcagcttgatatacggcgtttcgccgcagccggagcaggcgccggagtattcgaacagcgggctgatcagctgcgaggtgcggatatcgatacgttccagtttgctgcggtccatttccggcagattgaggaagtagtcatagttcactttctcttcttcaacgtgttcaaggcgcgacatcatattgatggccttgatttccgggttctgcctgtctttggccggacaaacctcgacgcagagattacagcctgtgcaatcttcaggcgcgacctgcagaacgtacttctggccgcgcatatcgcgggctttaacgtccagagaatgcaggctggccggggcattttccatcgcgtccggggagaccactttcgcgcggattgccgagtgcgggcaggcggccacgcagtggttacactgggtgcaaagttcttccttccagatagggatctcttcggcgatattgcgtttttcccagcgggtggtgcccatcggccaggtaccgtccggcggcagggcggagaccggaagcgcatcgccgagcccggccagcatggcggcggtcacggttttgacgaaatccggcgcggcgtcggagacgaccggcgggcggttcgggctgttggcatcgacctgctgcagcggcacttccgccagcgactcgcgggccagggccagcgcctgccagttgcgttcgaccagctcctgacctttgctgctgtagcttttagcaatcgccccctgcagctccgccagcgcgctatcgcccggcaggatctgcgtcagatggaaaaaggccatctgcatgacggtgttgatgcgcgctccaaggctacactcgcgggcgatttttgccgcgttaacgatataaaaccgcgcttttttctgatccagcgtggcctggacttcctgcggcagacgcgaccagacctcttcggcgccgtaaggcgtgttgagcaggaaaataccgccgggcttcaggcgttcaaccatctgatacttgtcgataaactgcagctggtggcagccgacgaaatcggcctgcgaaatcagataggaagaacgaatcggcttctcgctaacgcgcagatgggaaaccgtcaggccgccggcctttttcgaatcatagacgaaatagccctgcgagaaccacggcgtcgagttaccgataatcttgatattgtttttggtggccgagacgctaccgtcgctgccgagcccgtaaaacagggcttccagcttcgcctccgacggcagcgtgttttctaccagcggcagcgaaagattggtgacgtcatcgtagatgccgacggtaaagcgcggcttgggtttagcggcgctcagttcgttgaatatcgccaggacgcactccggcccgaactcttttgaagagagaccgtagcggccgccaatggtacgcggcagggtttctcgctcgccgcggttgaaggcttccgccagcgcggtcatcacgtcgagatacagcggctcagcctgggcgcccggttccttggtgcggtcaagcaccgctacggcgcgggcgcttaccggcagcgcttccagcaggtgggcagcggagaaggggcggtaaaggcgaactttcagtacaccgactttttcaccgcggctcagcagttcatcaactacttcctcacaggtgccgattgcggagcccataatcacgataacgcgctcggcctgtggatggccgtagaactcaaacggtttgtactgacgcccggtagcggcggcaaaatcgttcatcgccgtttcaacgtgcgcgtaaaccgcgtcgtaccacgggttagttgcttcacgtgactggaagtaggtatccggattcgctgaggtgccgcggattaccggatgttcggggttcagggcgcgctggcgatgttcatcgattttatcctgcggcagcaggctgagaagggtatcgtccgccagaggggcgattttgttgatttcgtgcgaggtgcggaaaccatcaaagaaatgaataaatggcacccggctttgcagcgtggcgatatgcgaaatcagcgcaaaatcctgggcttcctggacgctgctggcgcagagcatcgcgcagccggtctgacgcactgccatgacgtccgagtgatcgccgaatatggagagcgcgtgggttgccacggtgcgggcggcgacgtgcagaacaaacggcatcagctggccggccagtttgtacagcgtcgggatcatcagcagtaaaccctgcgatgaagtaaaagaggtcgagagggcgccggtttgcagcgcgccgtgtacggcgccgattgccccggcttccgactgcatttcgacgacgcggggaacatcgccccagacgtttttcagcccgttgcccgcccaggcgtccgcctgctccgccatcgtggagctgggcgtgatcgggtagatggcgataacttcactggtgcgaaacgcgactgaagcaaccgcgccattaccgtcgatagtgatcatatcaatactcacattgctaaatttttgataaaaaagtttttatgcccattgatacacgctgagctcttctgcgaaaccgctatcggcgcgattccaccggtagcggataagttcgtctctcacctgcctggtaacggggttgcgttacctgcatcgctacgggcagggtgaccgggtttgtgaatcactgtttaagtatagaccccagaggaacatgattttttgatctccagtagcgacaaaatccatagttcagataaattaattcaaggtattacataggtgcctacgtatgaacgacaccctacaccaaaatcagtggcgtcatttttccataagtagcagtgtggcgaattccgccagtcaaagcctcctggccgacaacactgccttaattacctgtaggtaatttattcgagttttgctatattttagatacctgatggtaaatggcgttagaatcattgcgatggataaatacgaaatcagacgacagcgcttgctctatatccgtgataatttatgcggcggtaaggctgttgatgtggcccgaacccttggacgggagccttcttacgtctcaaggatgctctaccccgaaggcaaaaagcaaaagaaaaggatagctgacgagatggtcgaacttattgaatcttcgttcaatctgccccgtggatggatggacggtatcaccgggaatattgatatcgagcgagaaccggtagaggattcgccgcagatgccatatgtcattgaggttctggatgcccaggccagcgcagggccgggctgcattgtctccagtgaggttgatgaaacggtgaatagcatcacctatgactctgccggcgcgctgcggctttttggtaaccggcccgcagagcatatcaaggtgattaccgtctccggcgatagcatgtccggcaccattgagaccggtgactacatttttgtcgatgtctcgaaagactactttgaaggtgacggcatttatgtcttttcttttaagggcgcggtgctggtgaaacgtcttcagttcacggcggatgggctgctcgttcactcggataacagcaaatatgcggactggacgattggcgaaagccatgaacagtatctgaagatcattggtcgcgtgatttatagccacagcgttaaacgctttgtttaaaggcgttcattgccgcgcagcttcgccatcctgtttctgtcataaaccctgagctcaaccataagcattacccgggtatgccacctgtacgccgggcatacctgcggcttctcaccccaatccagggacacgctgttcaacactacccgcctcggaccttttcagctgtttttacgcggcataccacttttttcaaaaatattttcaatattttcaagtgtttaatgtgttttcttcataaagtatacctataggtatttatttttaaataaccctgaggtattcttttgtcatcagcttgatagacagcactatccggatgatgaaatacaacgattcataactgaatctacgtggctgaaaagccagcgccatggcgcagtgcgctttggggggaagccattggcaaggatccgattgccgatgacattccgccaaagcccattaaaggagaccgcaatgtcccgtaaaaccgcgtttaatggctccgctgcgggtcgacgtcgcgcgcagcgttcccacttacaaaatccgcaaacgctcagctcagatcttatccaccggcccactccgtcccgcgctcagattcaggcaaaagggaagcaccatacgcctgaacgtattgaggacgcattgccgattaaatttgtggcacaggatattttttggcagcgcgaagaatataaacggcaaattgagcgagcgaccatcatttatcagcaagaatttgcacaccagtatgcgcagccaggaacctggctcttccagagggcaatttatgcgcttggtttgcaaaaaagaaagaaagtaacggcgaggtaacgccttagtgccaggaaaaatgaccctgcgcttcgttatttaccatcataactcatagtgaaagaagggagggtatatgtccgatcctgtttccggtacgtcgataattgttgctggtggattaatgggcgctggtatgtttggcctggtgacaggtattgattatggcgttgtttttggggcttttgccggcgcggtattttatgttgcgacggcagttaatatcacgcgttttagactcgctgcctattttatgacttcttttattgtcggcgttttgggttccgggttaattggtacgaagctggctatctggaccggatacaatgaacggcctttagacgcgttaggcgccgtgctgatatccgcgctgattattaagatactcacgttcctgaataatcaagaactaaccgacctctacaaaatactaacccgcaacaatagtgggcgcccgaatgggaaatgaacttcccgcgctgcttaatgccgttctctgcgctttgatcaccctaaccttaatgttttatcggcgcgcccggtacagaaggtatcgaccatggatatcgtatacggcttatttgctggtaatcacttatgccagcataccgtttcgttatctcttcggcttgtatacgtcgacccactggttggttgttaccgtgaatttttttgtctttattgccgtgtgcctggtgagggggaatattgcgcatttaatcgataaatgaggaataaatgaataaagatgagatttttaatgccattctggaaaaggagggcggttatgtaaatcatcctgatgataaaggaggtccgacaaactgggggattactcaagtcaccgcacgggctcatggttatgatggcgatatgcaaaaactgacgcgccaacaggcgctggatattctcaacgctgactactggattgcgccccggttcgatcatgttgctgaaatatctaccgcgatcgctgaaaaactgtgtgacgccggggtcaatatggggcctgttctgccgggtaagtggcttcaacgctggttaaacgcttttaatcatcgtggagtactttatccggatcttataaccgatggtgttattggccccaggaccttaaatgccttgagccattatgttattcgaagaggcagtgaaggggagcttgtactgctacgggcattaaactgtagccaggggcagtattatctggagttagcagaaaaaagtgaggctaataaatcatttatatatggttggttaagggctcggatagctatgtaattttctgttttattaatctaattcgttcagtaactgaaatctggagaaagtaaatatgtatacatctaatgatttaaccctctcaatgttttactcatctgccattgctgaggaaactggtaataaagtcgcaacgctcaccgttcaaaccatggggccatcagcggaaattttacaaatcagtaagttgcactgtattactgatgaaaataaagcgaaacgttatagtattggcgagcagtttattgctaatggctccgactctcttctcgccgctatcgaaacctggtggcgtgataattctgcggctctcattgaagagttaatgattgaagttatggattttattttgagtaatgttaaccaaaatgcaacctggatcggccagtatggtatgaaaatttttgaaaatgagccggtggcaaaacgtatccctgatagcgtattacagaacggcagccacaccaattcctgaaaagtgatgtggtgttaaagcgtaatcactatggcgcaacaataagtcataattaaacaagctattcgcattgataaaatgcattcaaatatttaaatatcaataatggagatattattatgggttttgctctgcctaatggctcaaccgtttttgttggttccggtcttggttctcccgtatctgtgagtacggtttccaatgctgaaggtgcggtatttaccgttgctgaaaatcataaccttaaggttgatgatgtcgtgctgatttcttcgggttggggtgtaatcgatggtttagttgccagaatcaccgcacaaacaacaaatagcgtaaccatttcggtcattaactccagcgaccgaaattttttcccggctcatgccggtggcgggaaattacagaaaatcacggagtggactgagattccacagattacggaagtcgcacagtcgggtggtgaacagcagtatgcacaggtacagtttctggcagacgatcgccagcgtaatattggcacctttaaggcggctaaaagccaaacctttaccttagcgcatgatgcttctttaccgatctataaagtattgggcatggcggatcgctacggtcaggtgttaccgctacgcatgtttgtgcctaatgcgaaggagtatcgctattggtctggcgttccgtcatttgatccgcaaccagtgaccgcggtgaatagcgttgaaaccgtacaagtcgcgttctccattcactctcgggatattactttctacaaatcggaagattaatcgttctccttctctgtggaacataaattaaattcaactgggctcctgcgggagccttttttaagggtatttatgagcgctattttcaaattacaacctaaccctgtttttaaagctgatgttgctattcctcgtgccggtgaagaagacggagtgctgaattttacgtttaagcatcggccaataaaagaactggcagagctagaagatattgacgaaaaaacggtctgtgatttcttactggagatcgtcgacggctgggcattatctgaaccctgtacgcgagaaaatataggcgtgctggtagataactatccgggggccgttaaagcaataatggctacttattatcaggagctgacgggaaatcgcgaaaaaaactgattgcggttgcctctgcattctatacgcctgaaccatcagcggatgagctaagcgcattcggtctgacagccgaagactatgacgatgttgtcatcaacgtctggcccgatatctggcctgcgtttgtagtctttcgcgcggccagcacgcagtggcgcaccagtccaggaggggttatcgggctggactacagtgtcctcgcatggctcatgagggtttatgatatagctgatgaggtaaccgcaataaacgatattcaggtaatggaacgggtagccttgaatatcctgaataaactacagaactagcctgggttttagcagaagtatgttcacattattaatcaatgtaaaccagataagtagttggtttattctttcaggagataatcaatggcgggtgatacaacaataacactgcgcatgaataacagtgaactggaaaaaagcaatcagcttctggataaatatcaacagaaagtaactgtcgccagccgtaaaagtgaagagtttaataagacttttcgtgccgcaacagatatccagaaaaagcatacggatggcctgaaaaggttaatgcagacgttaccccttcctccagccagaatggggcccatacttcaggatatggtaaagaaatctgaggatgagacctacaatataacgtcaggctctaaaaattactgggattcactggcaggaatgggtagtcctccaaaagaagaactgggttatacgccaaaagtttttcgcccaggcgcaaatatggaagagcgttctgacgatgatacggaaaaaggggggaagagcgattggctcggcggtttaatggcaggagccaaagaggcgtgggataaattccttaaggatggagaaaacgttcatggcaagcttaaggatttagctaaagacgccttcagctcaatgggaaactcgctggtggaatatataaccacaggaaaggcgaattttagtgatttcctgatgacctttctgaaagggacgctgaagatgcttagccaattattgttggtaaaagccatgcaggcttcctttaacgcgatgtcgaattctggcattggctgggtagcatccatcggtaaagttttcacgggccactccgagggcggctataccggagacgggggtaaatatgagccgagagggattgttcatggcggcgaatttgtttttaccaaagaggcgacctcggcgatagggattggcaacctttacgccatgatgcgcggtgcgcaggggtatgcgggcggcggctatgtgggaacggcatcaatgcagggactgggttcttctggcgcagggccactgaccattcagacctcagtacttattcagaatcagggctcagaaccgcaggcggccgacaataacggcgcgttaaatcgcgcctggcagcagacgatagaccgttccgttcgcgctggtgtggcaaatgaattgaggcctggtggccttatctggaatgcaaaccacgcacgttaattttttgattcccggagaaaatatgacaatagaaacctttacctggcgaacgcaaatacaagcgggtttgcagggggattttaatttcaccgttcgcgaggctcgttttggcgacggatatcagcaggtcgtcggcgatggtctacattttgaaaaacaaagctggccagtgaccttgaccggagaaaaggaagagatattagccgtgcttgaatttatgcggcgtcatgtaacgaagtcgtttatctgggatacccctgcgggggaatccgggctttatcgtgttagcgccgattcactaaaactttcgccattatcgagtcaagtaatgacggtaaccgctacatttaaccaggcatatgcaccatgattacagctgattatcaaaaacttgaacccgggagtgaaatacgtttactggaaattgatggcagcgtctttggcatggatgatgtcttatatttccacgggcacagtatcgcccatagcgaagctgaaatccaggctgctggaggggacgaaacgcgtttgcctgcaaaatccatttggtggcagggcaatgagtatatgccatggccttgtattattgacgggattgaatcctctaccagcggtcgggacgcgcaaccatcgctgaaggtggcaaatattgatgcttcgattaccgcgctgtgcttgtattacgatgacctggttcaggcgaaagtcaccattcacgatacgctggcaaaatatctcgacgcacgtaatttccctgaaggtaatgcgagagccgaccccacgcaggaaaaacgaaaagtcttctttattgatgccaaaagtgaggagaccaatgaagcgattgagttcactctttccagtccaatggatttgcaaggaataatgatcccaacgcgtcagctgcattctatctgtacctggtgtatcaggaataaataccgcagcggcgatggttgtgattatacaggccagcgatattttgataacaataatacacctgttaccgatccggcgctggatgtttgtaacggcactttgtcggcctgtaaattacgctttggtgaagacaatgagctgccttttggtggttttcccggcacgtctttaattcggagttaacatgcgccagaaagttatcagggctattcaggtgcatgctcaggagcaatatcctcgagaatgctgcggtgcgattgcccaaagggggcgggtagagcgctatttcccctgtcgtaatattgccgatgacccccaggagcattttgttcttgcgccggaggattatgcacgggtagaggattggggcaccgtaacggggatcgtccacagtcaccccgacgcgacgacccagccaagcgagctggataaggctcagtgtgacgcgatgttgttaccctggcatattttcagctggccggaaggcgattttcgtaccatttatccgcgaggagaattgccgctgctggaacgtccgttcgtgcttggccattatgattgctggggactggtaatgagctattttcgccagcagcataatgttgagttgacggattatcgtgtggattatccgtggtgggaagatggctaccctgataacttttatcatgattgttggtatcaatgtggctttcgcgagtttgatggcccgccgcagccgggagatatgattatcatgcaggtacaggcaaataagtggaatcatgcgggtattctccttgagggaaatatgctgctgcatcacctgtatggtcatttaagccagcgagtgccgtatgggggatactggcaggaaagaacggtgaaagttttgcgctatcatattaatgataatgcgttgaataatgaaaaaatctgaaagacgttgggattttaaatcacccgatatgaaatgcgttagcaagtgaatgtgattcaacatcagagggctggacttgctctcgagtcaactcagcgtacgatattatcaatggcggaatagatgcttatgatttattcataatgtctgctgcagatggagtatttatgcaagaacatatggtcagaatagagttgggcggtattcttggtaagaaatttggcaaatctcattgtcggatggtggcaacggcatctgaagcgataagggctttatgttgtactatcaatggatttgaaaaattcatgaacaacagcaaagctatgggattaacctatgctgtttttaaaggaaagaaaaatattagcgaggatgatattcctttccccatcaacgataaagtaatacgaattgttcctgtcgttattggtagtaaaaaagctggcgtgctacagacgatattaggtgttgcattgatcgcggtcgcttcaatcgccactatgggcactggagggatattcgccgcgattgctgccggctccgggtggggaagtgccgcaatgctgggggcctcaatggtacttggcggtgttcttcagatgctctctcctcaggttccaggtttagccagtcaacaatctcctgaaaataaagcctcctacgcatttggcggggtcacgaacaccaccgctcagggatatccggtaccgttgttatacggcaagcggcttatcggcggggcaattatttcagcgggaatttatgtagaagaccagcagtaaaatatccggcttctctcatttcagaccacctttgaggtggtttttttatggacaaaatatctatgacacagcatctcattaaaggttgtaagggcgggagttcaagcccgcgtaccccaacggaacagcctgatgatttacagtctgttgcgaaagcaaaaattctcattgcgctgggcgagggtgaatttgccggtgcgcttaccgcaaaagatatttaccttgatggtacgccgctggaaaattccgacggctcgcaaaattttagcggcgtcgcctgggagtttcgaccgggaactcaggcacagaattacatccaggggatccccggttcagaaaatgaaattaacgtaggagtggaagtctccagcaaaacggcctggtcccgctcttttagtaatacccagctttccgccgtccgcctgcgcttaaaatggccatctttactgaaacaggaagataatggcgatctggtagggaacgccgtcagctatgccgttgatttgcaaaccgatggtggtagctggcagacggtgctggagagtgcggtaagcggaaagaccacttccggttatgaacgatgccaccgcattgatctaccccgggcgacgacgggttgggttttgcgcctgcgtaaagtcacggaagacgcaaatacctcaaaaactggcgatgttatgatgctgcaaagttatgctgaggtgcttgatgcaaaactacgctatcccaatacggccctgctttacgttgaatttgactctcgtcagtttaatggctctattccaaaaattgcctgcagtcctcgcgggcgggtgatccgcgttcctgataactatgacccggagacccgccaatattcaggcatctggaccggagcattcaaatgggcgtggacggataacccggcctggattttttacgatctgatcgtcagcgatcgttttggcctggggaatcgtcttacctcagaaaatattgataaatggacgttgtatcaggtagcacgatattgcgatgaacccgtccccgatggtaaaggtggggagggtaccgagccgcgctatttatgtaacgtctatgttcaggatcgcaacgatgcctatacggtgttacgcgattttgcggccattttccgtggcatgacctgctggagtggcgatcaggtgattgctctggcggatatgcctcgtgatattgattacacctacaccagggctaacgtcatcaatggtcgttttcactatgtcagcagcagtagcaaaacgcgctataccaacgcgctcgtctcatggtctgatccagagaatgagtatgcggatgcgatggagccggtttttgagcagccgctggtcgcccgctatggatttaatcagcttgaacttacggcaattggctgtacccgtcagtcggaggccaaccgtaaagggcgttggggaattctgaccaacaataaagatcgcgtagtgactttttcagtcggactggacggtaatattccacaacccggctatatcattgcggtagcggatgaaatgctggcgggaaaagtcaacggtggccgtactcgcgaagtggatggctgcgttattacgctcgatcgtaaaacggaagcgaaagccggggaccgtctgttattgaacctgccatcgggggggacgcaaggccgaaccattgagagtgtcgatggacacgtcgtcaccgtcaccgctgaatatgccgaaagaccagaaccggaatgcgtatgggccattgagtctgactctctgagggtccagcaatatcgtgttgtgggtgttaaagataataacgatagcacctttacaatttccgcagctgctcacgatccggataaatacgccaggattgattccggtgcgattattgatagtcgaccaatcagcgttattcctccagggaagcaaagcgcgccagctaatatcgttgttgagtcttattccgtggttaatcaggggattagcgttgaaacgctgcaggtgcactggacggcagtaaagaatgccattgcttatgaagcacagtggcgccgcaatgaaggcaactggataaacgtgccccggagttccgttgcctcgtttgatgtcagcggaatttatgccggccgatacatcgtaagggtgcgcgctatcaatgccgcggaagtgtcgagcggctgggcatattcgcaagagaaaacgttgaccggcaaaatcggcctgccttcggcacctgtttcgctgactacaacatcccttctgcatggcgttcaactaaactgggcgttcccggagggaagtggcgatacgcaaaaaaccgagctgcagtacagcccaaatccaaccggcaacggcgcgatggcgctttctgacgtaacgtatccgggaaactcgtatcagcagatgggcctgcagattgcggcgacgttctggtaccgggcacgcattgtcgatcgccttggtaacgaaagtccgtggaccgtctgggtgcagggaatggccagcgacgatatcggggagtattacgacaagctaaccgacgcaattaaagacaccgaagcctggcaagaatctcagcgggatatggaggaaacccacaaaacgctgacggaaaccgctgatgccatccgtgaagaggtcgagcagcaggttaacgaaataaaccagagcattaatgagaccgctggggggatccgtaagcaggttgatgggcagatagcgtcggtcaataagtcgatgacagagaatattgacctcgttaatcagaccctcaatgacgccatctcgacagtaaacaaaagcatcaacgatgctgtgagtgatattaatacttccgtcgaccagcagatagcagacgtcaataaagccctgacagcgggggactcggcgttaaaatcccaactgcagacggttgaaaacggcctgaaacagtccattgctcaggcaaatacgggctgggataaagcggtaaaacaggagaccgctgaccgcattgcggacgtcaacgcgaaagcggcgcaggcggcagaccagttgctgaatgaaaaaaatgagcggctggccggcattgataatctgcagacaattattcaggatggcgacgagtcactggcccgtcagatcgctgaaatctctgccggtagtgggcagcagtttgattcgttcagtatctggtacttcgataaagacaatgaagggtggaccgaggacgatgccggtcaggtgccgatgcaaatcacggacgacggctggctgaaagcatcgaacagcacggcatcctgccgttcgccaaacgggcaaaaaatcccgggttcctcctatcgcaccgtcatgctgcgtattaagcgcgtgggtaatccggcatggaaagggcggctttactggattggtacagaggaaaccggctggagtgatgcccgctcggtgactatcgccgagcaggagtttgatggcgaaggtatcagcgtggtggccatttccgacgtgaactggaacgcgtccggcacggttcgccgttttcgtctcgatctggcccaggcgcagaatgccgacaactattttctgatccactggatatccgttgggcgcccggcgccggcagcaagtacggcggccctgcgtaatgaggagatggcgcggacgcaagcggatgaggtagaggcgctgaaacgctccacactggcggcgcagatcaggggaacctctgacagtaacagccttgcagacctgcgttccggcctgctgtatcaggagatgaatgcccgtatcaccgccgataaagcagaggtgacggccagagaatcgctgcagacgcagttcaacgacaataaatcctcggtcgcggaggagctgagttccctgtcgaccacacaaagcgcacaggccagcaaaatcagcggcctggaaaccagtctgggtaaaaaagccgatgcaaccgcgctgcagtccctcacgcaaaaggttgaacagcagggcaccacgttaaccagccagggaaatacgctgacctcgctgtctaaccgcgtcgggaaaacggaatcgggcgtggccgcaaacagcaacgccatcacgggcctgcagtccagcgtcagccagcaggataaaacgctgaccagccagggcagcgcgatcgctaaactgcagaacgacctgacgataaccaattcaaacgtcagtaaaaaggccgatgcgagcgcggtcacggcgttaaccaaccgggtatccgcgacggaaggcaacctgaccacacagtctggccagctgacgatgctgaaaaacaccctggctgaagggagtctgattagcaacggcggcatggatgtggatctgtcgttctgggagaactccggtaccggctcggcgttcacttatgattcgggtgaaaaagccctgaaaaccacgactggctccattcgcgtcgccaacgtaacgcgtatccccgttgaggccggactgactctcacggtctcttttgagtaccgtacttcggaaacggttaacagcgtatcgtctgacaccgtcggtgtgatagcggatttaggtaatccgatcgcatggttatcgtctatatcgccgtggctgagtggggtaacgaccagctggcagacgaaaaccgtggaactgaccattccagcaaactttaccgggaattatgtctatctgcggtttgccgccgggggctgggcaccgtcaaacagtgcgcgtctgtatatccgtaaagtcaacgttttttcgtcgaccggggtgtcgaagaaggcaaatgcctctgccgtgactgacctgaccagtcgcgttgactcggcggaagggaagctggccagccagagtcaggcaatcacaaagctgcaaaatgacctgaccacgacgaactcgaatgtgagtaaaaaggcggatcaaagcgccctgacgtcactgaccggtcgagtggagaagacggaaagtggtctgactgcagcgaacagtaatatcacttccctcaacagctcaattagcgctgcaaaagctgcaggggatgattatattcctaacccggcgcttgaaccttcctacgaccgcatgggttatgacgtcgtttcagccactgctgccggtgtgcctgtagattgcccgtttgcgtatgtggttcgcctggccggtcgcgaccatgtacctaaaatcaacaatgttgcggtgactccgggtgatgttttcgagatgtcggcggaggttgcttgcggaaccggacaggcggattttaatctctatatcgctaatgccacttcagcgacaggtggtatcaaagcgagactttccggcgggaataccaaagtcaccgcagcgtggaaacgcgtgacatggcgctttacggtgccggccgatacgaattttatgcgtcccttcctgcaggttaaccagagttcaccctttggtacggtctggtatgcggcagactggcatctgcgcaacgttactgcagcgcacagtgcacagaaaaccgctgatgcaacagcaaaagcggtggactccctgacgacaacagtctctgtgcagggcgatacgctgagcagcatcggtagccggaccacggcgctggaaaacggtctgtcaacgacgaatgccagcgtcagtaaaaaagcggatgcgagcgcgctgcaattgttgcagaacacagtcaccgaacagggcaaaacgctgaccagccagggcagcagtctgacgaagttggataacagcctgaaggaaactgtcgcggctgttgatgccacaaaagctgatgccgatgcttcccgggcgatagtcggaaatctgttaacgaatccgtcttttgaacgaggtaaagatggttacagcggctggcaatcagcgacgtcaatactcacagcttcttcgccgcatagtggcacccaaattcttaaagtggttccaggcagcagtgtcgtctcgttgcttcagaagatttcgtttaccaaagatcgcacctacaaaataggtatcttcacgcgtgtttcaggtggaacaacaatgccgtcaggcaccgctggcaataataagctgcgtattggtgattctgacggaccactgaaggaggttcagtttaaccccgcgacgctgcccacgagttctgtctggcaggaaatttcgggcacatggaaagccacgaaaaccgcagtccttgacgtctcgctcatggtgctgctggcgacgggagagcagtattttgatgatttctatctggtagacgtgactgatgaaaccaatattgcggtcagcgccaccgccatcagcaacctgacaaaccgggccagtagcgctgaaggaaagcttgagagccagagtcagtccatcacaaagctgcaaaacggacttgccactgccgaccagaacatcgcgaaaaaggccgatgcttcagccgtcgcttcgttaggcaaccgggttactgaagctgaagagaagctgacgagtcaaagtaacagtattacccagctagaagcttcactcgatagcgctcgcgataccggtgagaatctggttgaaaactatgatttcagaaaccaattaaatgcgtggaatctgcagaatgccgggcgcattgtgtggggagcatcaaacggggagggtgctcccggtgtgataatcacgcatatgggtgacgcaagtaatcctggattaatgtcgaataacgctaaatggttcccggtaagttcatcacgccggttccgttttaaggtacgtgcaaaattaatctcaggttcaggtgggattttatgccgcatctttaattcgaagaccgctggtacttacacccagacgcaggctgttgtaaccagaaaagatggttttgaaacgctgacggtagatatacccgcgttgccggccaccaccacagacgcaaggattgctttttatgtatatccgtccgcgacagttgttgccgtcgacagcattgccgtttatgacgttaccgatgaaaccgtgggttcggccaacgccagcgcagtcagtgatttgacaacacgcgtgaccagtgctgaggcgggaatgacttctcaggggacggctattacaaagctgcagaatgatctgtcaaccaccaatgcgaatgttaataagaaggctgatgctactgcattaaacgcgttatctaatcgtgtaacgcagactgaaaaggatatcaacagccaggcggacagcattaccagcctgaacagcacgctaaatattaacgcccgcaaaggctcaaatccgtggctggacggaacgtttgaaacttatgacgttaatcagaacctgggtggatctgcgcgagttattagcggagtcagctactcgggcggcaaatgcatgcgcgtgacgcgtgcaccgaacactaccggtaacagcgacgacctaatcggctcacgtcttgccattcgcgacgcggcagtattcagggttgagttctgggcgatgatgccttccggtgaaaccccctcaggcggctgggtcaccgtggtcggcctcaacgtacaaaatgatgcgggcgcaaactcatggctgggagccgctaatgtcagcgaaacagcgctggccggtcgtgacaaatgggttaaattttccggatatgcaaaagccacagcgaaaggcgcgacgcgcgctgtggtctggatctccacgcgcggggcgaacggtagcaacacgccgggttataacctgtttatcgacgacatggttattacagatgtcaccgatgcttacaatgcgcagagcacggcagacgcgaccgcctcagctgttgattccctgacgacgcaagtctctcagcagggtgatatcctgacgagtgtcggaagccggaccaccatgctggaaaacgggctgaatacgacaaacggcaacgtcaacaaaaaggccgatgctaccgccctgcagacgctgcagaataccgtgacggaacagggcaaaacgctggccagtcagggtagcagcctgacgcagttgaataactccctgaatgatgccacggccagcctggctgctgatggtaaaattcccggcaacctgatttccaacggttcatttgaacgcggccaggaggctttcacaggatggggaagcgtcgggtccgttatcagtgcacaatcgcccaactacggcagtaaaatagcgatgtgtggtgtgggcctggccgggatctctcagaaagtaccggtcgtcaaaggcaacacctataaaatcggtgtgtttgcccgtgcgcagggcggttcagtcatgcaggatcagggtaataacaaactgcgtattggtcagtcgtccctgctgtacgatcgccagtttaacaccgcagacctgcccgccggctcctcatgggttgagctgtccggaacatggaaggcgacggttgacgggatggttgatgtggcgatctactcttccctgaagtctggcgcgcagtattttgacgacttctattttgtggatgtcacggatgaagtaaatatcgcagccaatgccggggccatcagtagcctgaccacgcgcgtgacgagcgccgaagggaagctgactagccagggtagcagcatcacgaagttgacgaacgacctgacgaccaccattaacaacgttaataacaaagcggatgccaccgcgttggctgctctgaccaaccgggtgacgagcgctgaaggaaaactggagagccagagcagcagcgtcacgtcgctaaataacagtattgcggccactcagtcggatgccgatgcagcaaaagcgattccggggaatatgctggcgaataactcattcgagcgcagttttgacggctgggttaactcaggctggagcatactggcggcgcagaaccctaagtccgggaagtacattatccaggcgacaaagacacccagcggctctacggcgtgcgatcagaacgtaaatctgattgcggggcatacataccgcattggcgcatgggtgcgcaagtcgggtgactttgcggtcagcaatgccagtaatactaaaatcagcatccgtaatagctcagggccgctgaaagatattccgataacaaccagcatcggaaccggctggacggagatctttggggactataaaccgtcctccgatgctgcactgactatttccctgcgttccagcctatcggccggttatctgtatgcagacgatgtattttgcatcgatgttagcgatgaagtcgcaaatacagcgaatgcttcggcacttactgccctgaacacacaggtcaaaattgacggaggaaatattgaggccaatacccgggagcttaaaagcctgaaagctgatttagggaccaaagcgatggccagtgcagtgagcgatctgaaagccgatgtgcagaaaatcgacggtacattaaatgctagcgtagggaaggtggatggcctggcgataaaggtcggagagctggatggtaaagttgagacccagggagagacgatagcggattcggaaggcaagattaactcgatgtactcaattaaagttgaaacaaaaggtgataagagagttggcgcagggatggtattagccagtgatggttcgacaagtgacatcatttttaatgctgatcgtttctctatttttaatgccaccagcaaagccgccgtgccggtgatgattgcggaaggtaacgagctgtatattgattcggcgcgaattaaaaacggcacgattgatattgccaaaatcacagatcgactttcctctactaattatgtggccggatggagaggctggagtattaccaagagcggaagtagtgaattcaataacgttgtggttcgcggtgaaatacaggctgatacaggtactttaaataatgtagttattaatgagagttgtaatatcctgggcaccgtaagggctaataagattattggagacgtcggctcgtgggcaatcaatattgctcagcaccgctcccgtcgaattgcgaaagcacaatgggcctggttcgatttgcttgctgttgatcgccagccgttcgagcaacgagtgcagcttttaggcgcgcttcgccaggacgactcaattaatattacgggtggaggtaaattaacggcaggtatggagtacaggagttatgaaggtggctcgttgagtatgggtaaactagggtactgtattctcatgctgggtaccggcgctacttcgggtggtggccccatgacctgtgcgctctctattgatggcgttttatataagcaggaaaatgagagtatggaaattcagtcaatggacttcatcgttccgccaggtactggccagactgttgtgcgctatgggtactatctggacagaaacggtggtatgacgggcgtaatcttgtcacgttttcacgcgtttgttatgcgtaattcaaatattattcgaggtgtttcaagtgattaaaaggctaagctctgttctaaggtggtgatttaccagaccacggattgcgcagtgagttaaatttaatagcctgaaatacaaaccgaaacggcgccctcatcatggatgacatagtgagggcgctttgcgttctgaaactgaggatgaataaaaggagaccaaaaaaatttgctaataaatgttaatacagcgcataaatacgtacttcgcctctcgacgcggcgcgctgagctgcctattatccttaggcttgttcattttaagatgtatctgaggggagagaagatgcgagctgcgtttttagtgggatgtgctgcgctgttactgtcggcgtgtagtagcaatgatgaacctgttcagcaggcaacggcggcgcacgtgtcgccgggaatgcgtgccgcgatgagcagctccggccaggcaaactgcgccatggttggcggctcgttatcggtcgcccgccagcttgatggctccgctatcggcatgtgcgcattgccgaacggcaagcgctgcagcgagcaggcgctggcaggcggaagctgcggtaactattaattcatcaggtcggcgagcttatacaccagcgtctggtcggcggtcgccagcgtcagctgcgtttccgtcaggtcgacctgcgcgccttcgcgcagcattttgctcagcgtggcgtccagcgcgttcagctgcgagtccgtgcagagcatgcgggtcatcgccagctcttcaaccttcagctcgccgtcagagactttgcccgtgccgctgaagcggttgcacatattacctgaaacagacatcttgcccgtaatgggcattttttcgccgaagctcagctcctgcggcttatccgcggcattcagcggctgcccgttaacgctggtcagcacaaaacggtgatgctgaagctgttccgctctggttgacaccttgctgttataaacgcagcccgatagcaacattccagccgccagcagcgcagcaaacttgttcatttagtctccataaatatttatcgtattaataaatgaagggaattgtaactttatcgcaggcgattactgtggggattatctgaatgtgccccccgcagaggaggagcacaaaagggaaaggaatatcagaccagcgcgttagggcaggtttcgcaagcatccacctgacgcaggttgtcgagggtggtttgtgaaatgctgatcagcgcttccgcggtcagaaacgcctggtgaccggtaaacaggacgttatggcaggcagagagacggcggaacacatcatcctgaatcacgtcattagacttatcttcaaagaacagatcgcgttcgttctcatacacgtccatccccagcgcgccaattttctgatgcttaagggcgtcgattgctgcctgcgaatcgatgagcgcgccgcggctggtgttgatgatcatcaccccgtctttcatgcgatcgaacgcggcatggttcaacaaatggtagttttcatcggtcagcgggcagtgcagggagataacgtcagactcccggtacagggtttcaagatcgacatactccacgcccatatccagcgcggcggcgcttgggtagggatcaaacgccagcagacgcataccgaagcctttcagaatgcgcagcgcggcgacgccgattttaccggtgccgataacgccggcggttttaccgtgcatggtgaaaccggttagtccttcaagggagaagttcgcgtcgcgggtgcgctgataggtgcgatgaatacggcggttcagcgacatcatcatgccgatcgcgtgctctgcgaccgcttccggcgagtaggccgggacgcgcaccacgcgcaggcccagctctttcgcggcatcgagatcaacgttgttgaagcccgcgcagcgcagcgcgatgtacttcacgccgtgggctttcagttcttcgagtaccgggcggctaccgtcatcgtttacgaagatgcacaccgcttcacagccgttggcggttttggcggtcttttcggttagcaggaagtcaaaaaattccagttcaaagccgtatgcatcattgacgtgctgcagatacttcttgtcgtactgtttcgtactgtatacagcgattttcataagacttttctccagtgataataccgtcacggtagcataattaaaataatcttacaaatgttaaaaactagtttaatcagcaggttatagtattaattctagagcatatcgtagagttaagaaatctctttaaaagacaatacgtttcattaaaagttgaggctcagcgcccctggcgccagcaggatcagaggccagagtaaacctgaactgacgttagcgagctgaaactgccagagagaggtcccgctggcgccggtgaccagcggtacggtggcgcgcagcggagagagaaagcggctaaaaaagaccgcccacccgccgtggcggcgcaggaacagctggccgcgagcgaggcgttcggcattaagccagcgtatacgatgcagatggtgccggtagcggtagcccgtcagccacgagagccagaatccgccgatggcgccgaggctggcgctcatccacattaacaaaaaatggccgacgctggccgatgccagggtgccgaacagcagcagtccggaggtgccggggatcagcagcgagataacggcgcaagatttcgtgaacgtcagcaggaaaaccatcagcaataccaatgaatagcggctctgagcgtattccatcagcgagataattaagtccacagcaccatccgtttacgttcgcaggtgtggaccagtgtcgcaggcgaaaactaaaccccggctaaatagccggctggtgaatcagatggcggcgactacgcttaaacgggatggaaactttaactcacaggtcgaacgtgccacaatagcggcctctcggcttttacttatttcgaatcaggatattagctgcccatgaagggtaaatataaagccgccatcgcgctattattagccctcgtgctgctaccgctggctttgctattaacgctcacccactgggtgcccacgctggcaggtatctggctaccggcgggaacccgaatctcacttaatgaaagcccgcgactgacgcgctccgcgctgcgtattccggatctgcgctacctggtcggcgactgcgaaatcgcgcgcgtcgccaatgcctcgctctcgcgtcccagccgctggcgtttacatatcagcgagctggatataaacagcgcctgcctgaacaagctcccggacagcgaagccgcgccgggggcgccgaaaaccctcgccgaatggcaatcaatgctcccttacagctggctgacgattgacaatctgcgcctgtcaccgtgggagaaatggcaggggcggctggtgatgtcgctgacgccgcagcagcaggatatcggctatgccggtaaagaggttaccctccaggcgcggctgcgcggccaggcgctgacggtcagtgatttttccgcgcgtctggtggaagatcaggcgccggtgaagctggtgggcgagtttcagatgccgctggtgccggacggtttgccggtcgacggccacctgttcagcacctttgaatttccacaaactcccggtcttgtcgatgccgagctggagtggcagaagaaccgcgggcagctgctggtcacgccgcgcggtgaagtggagccgatgcttgacctgccgtgggaaatcaccccggatcgtatcgtcatcagcgatggccgctggcacaccgaatacgcgggcaacgcgttgagcggccgggttgcgctttcgctgggcaactggcagcagggcaccgagcagatgcaggtcagcgggcgtcttaacgtgctcactcagggccaggccgggaagggcaacgccgtgctgaatatcggccccggtaagctgagcatggacagcagcgacatgccgctacagctgaccggcgaggccaagctcggcgatctgattttttatgcccgactgcccgcgcagctgagcgggccgcttaccgcgccggtgctcaattttcaccccggcgcgctgctgcgttcgcgcgggcgggtcatcgattcgttgaatatcgatgaaatccgctggcctctggcgggcgtcaaagtgacgcaacagggcgttgatggccgcctgcaggctattctgcgcgcccatgagcaggagatgggggattttatcctgcatcttgatggccaggccgacaactttatgcccgaccgcggccgctggcagtggcgctactggggcgatggccatttcaccccgatgcaggcgcgctgggatgttaaaggcgcgggcgaatgggttgatagcgccattgtactcaacagcctgtcgaccggtttcgataagctgcagtatggatccatgctggtgagtaccccgcgcctgacgctggaaaaaccgatccactggctgcgcgatgagcagcatcccaaactgaccggcgcgctgtcgctggatgccgggaaaaccaccttcagcggcggcagcgaactgccgccgtcaacgcttaagttcaacattgatggccgcgatccgacctggttccggttcagcggctccctgcatgcgcaaaaaattggccccgtgcgcgttaccgggcgctgggacggcgaacgtctgcgcggtgaggcgtggtggccaaaacagtcgctgaccgttttccagccgttggtgccgccggagtggaagatgaacctgcgtgagggaacgctctacgcgcaggtggcattctctgccgccgccgaacagggcttcgaggcgggcggtcacggtgtgctcaaagacggcagcgcctggatgccggataaccagatcaacggcgtcgattttgtgctgccgttccgctttagcgacgccacctggcagcttggcacccgccatccggtatcgctgcgcatcggcgaagtcgtcaaccagttcaccgcgcgcaatctgacggcggatctccagggcgcatatccctggagtgaagacgcacctttacagttgagcaacgtcagcgtcgatattctcggcggcaagctgaccatgcagcagctgcggatgccgcagcacgatccggcgctgctgcgtctgcaaaatatctccagcagcgagttaattagcgcgattaaagtgaagcagttcgccgtgtccggcccgtttaacggtgcgctgccgctgtggctggataacgataaatggattatcaaggacggctggttcagcaatccggggccgatgacgatgcgtcttgataaagacacggcagacgcgctggtggctgacaacgtctccgccggggcggccattaactggctgcgctatatggaagtggccacctcgtggacgcggatcaacctcgataacctcggcgtgctgacgctgaaggcgacgattagcggcaccagccgggtagaaggcaaaagcaatacggtgcacttaaactactcccatgaagagaatatctttgacctgtggcgcagcttgcgtttcggcgacaatctgcaggcgtggctggagcagaacgccaggctgcccgcgccgcgctgtcaggacagtcatacctgtaaggaacaacaataatgatcaaactattcgccgcctttctggccaccgcgctgctggcgggctgtacgccgcgtattgaaatcgcggcatcgaaagagccgatcaccatcaatatgaacgtcaaaattgagcatgaaattcatatcaagctggataaagacgttgagaatctgctcaaatcccgtagcgatctgttctgaggcgatgatgagaatacgactggtaaccgcggcgctggcgctggtgctgttcagcgctcaggcgcaggccctgaccctgaatgaggctcgccagcaggggcgggtcggcgaaaccctcaacggctatcttgaaccgctgcgtcaggataaagaaactcttgagctggtgaagcagatcaacgccgcccgcagcgacagctatcagcagctggcggatgacaataatctaccggtggatcaggtggcgaaaatggccggtcagaagctggtcgccagggcgcagccgggcgagtacgtgaagggccttaacggcaaatggctgaaaaaatagctatcggcagcgcttgcgatactcccccggcgagacgccgaagcgctgcttaaaggcggtggaaaaatggctatgatcgctgaagccccagctgtagccgatccccgccagcttttcgtcatcatgggcgctttgcagcgcgcgggcgcacaaatcgagccgacgattcttgatatattgcgctaccaccagccccttttccgcaaacagccgatagaggctgcgcaccgacatgccggtttcgctggccagccactccgggcgcagatgttccgcctgaatcgactcatcgattaacgccatgattttctgaaactgcttatcgcgccgggaaggctgggcctcctgatgatgcagcatcgggcgcagcaggcagacgatggcctccagcgccgctttgctttcgctggccgagagttcagggctgttcatgctttcatgcaacaggcgctggctgagctggaccatcggcaggcttttcgccagccgggtagcgatgctgatttcactgctgcgcagctgttgctccagcagcgatcttggcagcagcagggaggcctgacgcgaggtttgctgccagataattgaacagggacgagacgcgtcgatcagggtgatatcgccgctttccagcatcgcctggcggccatcctgctcgatcgtcgcctggcccgcgagctggaagacggtataaaaccaggcgtcgttatcgcgctggatctcttgtcgggtgcggtaaagattaatgccgcaggcggtcaccgtgctgactttcaggtcgccggcatagctggcgtcgatctcaccgtggaaattatcagccagcggacgggcggcgaactgcccgcagacctgattgatttttgctaaccaatgctggtagttctgcccacgatttgccgtactcatcgcgcatcccttgtaataataatgtttttgcattgttgcacttatgatgccggaggcaagggtcaacggcggagtatatgaaagaactattacctgctgcacattttctgtccgcctcatcgacttaattgcggcgcctgtcacagcggcaacagcgaatgtcacagagaaaaaagcgtgaatcgcgaccccggcataaactgaaatcactatccgtgaagaataaggaaggggtatgtccacatcacaggtcgcgctactcgccagcgtgcagcagtttttagacagacagcatgggttgtatctcgacggtgcgcagcaggcggcagagagcgaaaagcgcttaaccgtctgggatccggccaccggtcaggctatcgccagcaccgcggatgctaacgccgcggatgtcgatcgggcggtgatgtccgcctggcgcgctttcgtttcccgcagctgggcagggcggacgcccgccgaccgcgagcggatcctgctgcgcttcgccgatctggtggagcagcacggcgaggagctggcgcagctggagacccttgaacaggggaaatcgattaacatttcccgcgcctttgaagtgggctgcacgctgaactggatgcgctataccgccgggctgaccactaaaatcagcggccgcaccctcgacgtatcgatccccttcccgcagggcgcacgctatcaggcgtggaccaaaaaagagccggtgggcgtggtggccgggatcgtgccgtggaatttcccgttgatgatcggcatgtggaaagtgatgcccgcgctggcggctggctgctcgatcgtcattaagccgtcggaaaccacgccgctgaccctgctgcgggtagcggaactggcaaccgaggccggcgtgccggacggcgtttttaacgtggtgaccggcagcggcgccgggtgcggcgcggcgctgacctctcatcctcaggtcgccaaggtgagctttaccggatcgaccgctaccggtaaacagattgcccgcgtggccgctgaccgactgacccgggtcacgctggagctgggcggcaagaacccggccatcgtgctgaaagatgccgatccgcagtgggttattgagggattaatgaccggtagctttctgaatcaggggcaggtatgcgccgccagttcgcgaatttatattgaagcgccgctgttcgatacgctggtgagcggcttcgagcaggcggtgaagtcgctacaggtcgggcccggtatgctcgagagcagccagattaacccggtggtgtcgcaggcgcactgcgcaaaagtggcggcctatcttgctgaagcccgtcagcagaaggcagagctgattagcggtaacgtggggccgaatgcgcagggctactatattgcgccaacgctggtgattaatcccgacgccgggctgcgccttagccgggaagaggttttcggtccggtggtgaacctggtacgcgtggccgacggggaagaggcgctgcgcctggccaacgacagcgattttggcctgaccgccagcgtctggacccgcgacctgagccaggcgctgagctataccgatcgcctgcaggcggggacggtgtgggttaacagccatacgctgatcgacgccaacctgccgttcggcggcatgaagcagtccggtaccggccgcgatttcggccccgactggctggacgactggtgcgaaacgaagtcggtctgcgtacgctactagccgccttttccccggtggcggctggcgccttaccggggctacaagcgcgtaacttgcggattctgtcgccagtcctgcggcaaaatccgcgcctcgatacctcaaatccggcttatctccgtatgcccggtggcgcttttctccgggagtaaaccgtcactccagcaaggacgggtcggcgtcgatcatcatctccttcatctctgcaaaatgctggcgtgaaaagtcggcgatcccctcccagtcctgcgcggttttctccgccaccgcatcggagagcactttcagcggctgccccgttgaccaggcggtcaccagaatctggcaggcgcgctccagagtccagatatcatcgaaagcctcgccaatcgacggtgcggtcaccagtacgccgtgattgcccatcagcagccggcgcttgtcggccagcagcgacgccagacgcgcgccttccgccgtggtgtccgccatgccgccgtataacctatcgacggctacccgattgaaatagcgcgccgtgttctgatcgatcggcgggatatgcggcgtctcgaggcaagcaacgctggtggtatacaccggatgcaggtgcagtaccacccgcacctccggcaggcgctggtggatctgcccgtgaatcgcccacgccgtggcgtccacgtccgctcgccgggcgcaggcttcatcatcggcgtccagcagcagcaggtcgctggcgcggatgcgcgaaaagtgtttccacttcggattcagcaggaattttttgccgtccgccgagatggccgcgctaaagtggttggccaccgcttcgtgcatcccgagatgggcgatgatgcgaaaggtcgctgccaggtcgatacgcgtctgttcttcataagagcgggccatatgattactccgctttcggcatcagagtttgcagatcctctggcgtcggcgcctggaagttatatttcttcagcagcgcggcgtattccggcgtcgcgctgtatttcttcagcccttcctccagcgcggttttcacttcgctattgccttttttcaccccaaagccgttgagcaccggatagatcaaggtttcggaagagatggtcacccgatcgccaagcttgtcgatcacgccgcgcgccaccgccgcatcggtgatttgcgcctcaaccgcccgcgagagcagcgcctgggtggtttgcgggtcggtggtgtattcactgagcgctatcggcttcaggccctttttcacgcagtagtcagcggagagcttttgcagctgcgccagccatgacgtcgcccccattgaaccaattttgtggccgcaaaacgcttccggcgttttcggctgatagtcgctgcctttcagcgcgaggatcgcttcgccgcttttcagatagggcaccatatcgataaccttcagacgctcggcggtgatgtacatcgacgagttggtgatatcgaagcgtcccccctgcaagcccggaatcaaattcggaaaccgggtatcaatattcaccgcctcgcggcccatagctttcgccagcccggcaagaaactcgatatcgaaccctgcgggcttgttgttttccatatattcatacgggaaaaaggtcatatccgaaccggcggtgattttccccggctgctggaaggcctgagcgctaaaggacgacagggcgccagcggtgcaaaggagcagggcagcagggcggaaagctttaaaacgtttcatacaacctccagagagtgggcaaattacatgctggcgcgatcggtaccggcctgctggacgaaaaaggatgcgccgcgcggtttttgcggcaggcgtaaatgattcacggtactgcgcaccaggccgctctcttccccggcaaccatctgcccggcgtgcgcgctgggcagcggattttcgccgtacggcagggcatcttccgccgcgtagacgctgataaacagcgtccgcggcaggtcggtttcattggggctggaggcgtggagcagacgagtatgcataaagcacaccgatcccgccgggccaaaacaggcctgcggctgctggcagtgggtcgcttcaacctcccgatccacggcgccggtaaaacgatcgttttgccagtgggaccacagcggtccccgatggcttcccggcaccacgttgagcgggccgttctccggcgtcacttcgctgaccatcagcagggcggtgatgatgtcgtcgttgctgtgaggggtaaacagaaaatcctggtgccacttcacctgcgtggcggtgtgcggcagcttggagttgattttgctgtgatggaagcgggtcccgctgccgccgatcagctggccggcaatcgccgccattctcgaatcaagcgcggcctggcggtaggcggcggaaatctccgtgggggaactcacccggcgcagcgacggatgatggggcgcgtggtcgctttcgagatcgaaacgcggccgaccgtccagggtttcgccccacacttcgctatgctgtcggctctcttcgacccaggtgtcgaaatcggcctgcagcagcgcgatttcctcggcggaaaacacctcttcgacaaccagaaaaccctgctgatgaaactgttcgatttgccactgcgcgatcatatttttctcctttcgggaacggaggcgttaagccaaagagacatctttcaggaaggcgtccacgcgcggatgctggccgtcgcgcattgcctgaggcgtgtcgtcgcagaccacgcgccctttttccataaacacaattcggtcggaaaccttaaaggcgaagttcatttcatgggtgacgatcaccatggtgatgccttcatgggccagcgattcgataacctgcagaacctcgttaactttttccggatccagcgccgaggtgggctcatcgaacagcataatttgtgggcgcatcatcagggcgcgggcaatcgctacccgctgctgctggccgccggaaagctgatgcggatatttccacgcgtgttccagcatgccgactttatgcagcagttcgcaggcgtgctgcttcagctcgccttcgctggccagatggtgatagcgcggcgccagcagcaggttgccgagtacggtcaggtgggggaacaggttgaagctctggaaaaccatgccgatattctggcgatgctcgctgttctccataaaacgcggcttctgctgcccctggcggtcaaggtgaataaaaggctggccgttgattttgatctcgccgttatcaatctgctcaaggccgttcagcaggcggatcagcgtggttttaccggagccggacgggccgatgacggagaccacttcgccgggctgaatttgcaggctgacggcgcccagcacttcgacattgttataggctttatgcagctttgacgcctgcagcgccggttcctgcgcgacgctaacgctgcgggccattgccggacgccgcgcggtggccagctgctgcatttcttcatccaccggtcgcgtggtcttacgctgggtgacgtcgagccaggtctcgaggcgcttaagcaggaaatcaaacaccgtgacgatcaggatgtagtaaaacgccaccgccgccatggtctccatgacgaggaaattctgcgaatagaggcgctggccgaccattaagatctcggtcagggagataaccgacaccagcgagctgagcttgacgatggcgatatactcattagccagcgccggcagggcgacgcgcagcgcctgcgggatcaccacacgccactgggtgccggcatagcgcagcccgagcgcgcgggcggcttcgctctgtcctttgggaatcgacagcagtccgccgcgatgaatttcagcaatataggcggcttcgctcagcaccatcgccagcagtccggcccagaacgggtcgttcagcaccggggcgaaggagggtagcgcctgcggcatgttgtagacaaaaatcagcagcaccagcagcggcatgctgcgaaacagccagatatagaggcgggcaggcgcgttaaacagcttgcgcggcgactgtttggccagcgccagaataaaccccagcacaatactgaaagcccaggtcagcaaacttaatttgatgacggtccaggtggcctgccagaaatcgacatcgctgagcaggcttaacatatagttccagttaaacgtcatgggctatttcactcgccataattaacggaaattaaggcgattcccctgttctaatatggggagccgccggcgttcatcttgccatgacactatgctggcactcttcgaccggtggcaattagtaaatttttggcctttaagtttaaaaaaactatacagctatattaacctcagggaatttaacgcaattaatgagaaacagcattgaaacaacttaaaaacaatcacccttatttttaaacctgatttttcgtaaaatgacaatttgtgcaatattggggcgcgccgcgggcgaataaggtgcagggcgatgctttatggtgcaatacgcgaaatcaggcaaaaaaagagggcgggttattaaatagaaacggcggctatttgctgacgaggtaaagcgcaaacggcatggcacgatgcttgcaggctgcttatcgtaaaactaagcccgttcgtaataagacaatattttatcaatggtgaagcgatgaaccgatttaccctcaaacagcttaaatatttcgtgacggtggtggaaacggagagtatcgctgaggcttcccgtcagctgcacattgcccagccgtcgatctctattgcgattaaaaacctcgaaagtaccttcgaccagcagctgtttattcgtcaccacgcgcagggcgtatccctgacctcaagcgggcggcgcttctacgataaagccaaagagctgctgcggctgtcctatgagtttgagcagaactcgcgggcggataaagagctggtatccgggacgatttccgtcggctgctttgaatccgtcgcgccgctgtatatgccaaaactggtagcgggatttaaaaaaatgtatcccgaaattactctccagctctacgacggcgaacagcatgaactgatgcacggtctgcaccgcggacgcttcgatctggcgctggtctacgacctggaactgggtcactccattcataaagagctgctgaacgccccgcataaaccctatgctttgctgcccgcttctcatccgctggcgcagaaaaaatgcgtcacgctccaggaattaagccgggaaccgatgattttgctcgatgcggtccccagcaaaaactattttgtctcgatatttaaagagaaaggttatcacccggaagtggcctacagttcgccgtccatagaaatggtgcgctgtatggtcgggcagggattaggcttttcggtactggttacccgtccgctgtgcgatatgacctatgacggcgaaaagctggtgcagctggatattgccgacgaaatgcccgcatcgacattaattatggcgcatcttgccaataatgaacccacgcgtccgacgcagctatttatggattattgccgcagcatagaattaacgccgcatcagcacgcgtaatttaattaacgcgaccgcaagcgttattttcttgtcgcgttattcagcctcgtaaatttctattcagacgatcgttttataataatttaccatttcatcacacttacttaacctgagttctgtcaatcccggcggataagccggacaaccgtgcttgaaggacacagatatgacagagcagattacagagatcgataccctggtggtaggcgcggggcaggcgggcgtcgccatgagcgagcatctgacgcatcacggcattccgcatctggtgctggaaaaaaagcgcatcgctgaggcctggcgcagcggccgctgggattcgctggtggccaacggcccggcctggcacgaccggtttcccggcatgacctttcccggctgcgacgccgacagctttgtcgccaaagagcagatcgccgactacttcgccgcgtatgccaaaacctttaatgcaccgatcaaaaccggcgttgaggtctttagcgccgagcgtttaaacggccgtccggggtttcgcgtggaaacgtcactgggcgtgattgaggcgcagcgtatcgtcgccgccaccgggccgttccagcgcccggtgataccggccatcgcgccgcaggatagcgctgtacagcagattcattccgcacactatttcaacccgcagcagcttccggaaggcggcgtgctggtggttggcgcggggtcgtccggcgtgcaaatcgccgatgagctccgccgggcggggcgcgcggtatggctctccgttggcgcgcacgatcgcccgccgcgccgctaccgccagcgcgatttttgctggtggctgggggtgttagggctgtgggatgcggcggccaatcagcccggcaaagagcacgtgacgattgcggtcagcggcgcgcgcggcggtcataccgttgattttcgccagctggcgcaccagggaattaccctggtcggacagacgcacggctttaccgagggcaaagccgttttccgtgccgatctggcggacaacattcgtcttggcgacgcctcctatctggcgctgctcgacgccgcggatgagtatatcgcccgcaacgggctgtcgctgccggaagagccggaagcgcgctttttcctgcccgaccccgattgcctgacccagcccctcaccgagctcgacctggcagccgcgggggtgagctgcattatctgggctaccggctataccaccgattaccgctggctgaaggtcaacgcctttaatgaacagcagcgcccgcagcaccaccgcggcgtcgccagcgaaccgggggtctatttcctcggtctgccgtggctctcccgccgtggctcaacctttatctggggcgtctggcacgatgcgaaatatatcgccgaccagattgccattcagcgccagtatcaacgctatcaaccttcctgctaatgcctgatttgaggacgcaacctatgccaacccatacccgtattcggatgtttaacaccaaagaaacctatcccaatcagacgctcaataacgatctgtgccaggcggtgcgcgcgggaaataccgtgtacgttcgtggtcaggtgggtaccgattttgacggcaatttgatcggcctgggcgacccgcgcgcccaggcagaacaggcgatgaagaacgttaaacagctgctggaagaggccggcagcgatctgacgcatatcgtgaaaacgacgacctatctgatcgacccgcgctaccgcgaaccggtgtaccaggaggtggggaaatggctcaaaggcgtgtttcccatttcgaccggcgtggtggtatcggctctcgcgcagccgcagtggctgatggaaattgacgtcacggcggtgatccctgacgactggcatgcgcaggaggcaccatgaccctctctatttccgccctgtgcccggagtcaggtcaactgggcattgcgattagctcatccagcattgccgttggcgcccgctgcccgtggctgctggcgggcgttggcgcggtgtccagccagaacatcacgctgcccgcgctcggaccgcagatccttgccgggcttgaggcggggctcacgccgcagcaggccctgacgcaggcgctgggcgaagaccggtttagcgattatcgccaggtggcggtcatcgacgccagcggcgagagcgccgtgttcagcggcgaacatacgctcggcatctggcagctggcgcagggcgagaactgcgtggcggcggggaatatgctggccaacccgcaggtgattaccgccatgacggcggcgttcgaagccgccagcggcgaactggccagccgcctgattgcggctctgcaggcgggtatcgatgcgggcggcgaagccgggccggagcactcggcggctcttaaagtcgtggaggattacgcctggccagtggtggatttacgcgtcgactgggcggaagaacgcccggtagcggcgctggaagcgctgtggctggcctacgagccgcagatggaagcgtatatcacccgcgcgcttgacccgcgcgaagcgccgacctatggggtgccgggcgatgaataaccgcgtgcgtgagatcctcggcgcgctgctggcgtttgataccaccagccgcgagtcgaatctggcgctgattacctggatcggcgactttctgcgcgcgcgcggcgtgacgtcgcagctgttttatgacgacgaagggcgcaaggcaaacctctatgcccgctttgggccaaccggccccggcggggtgatgctctccggccataccgacgtggtgccggtggatggtcaggcgtggacggtgccgccatttgcccttaccgaacgcgacgggcgctactacggtcgcggcagcgcggatatgaaagggtttatcgcctgcgtgctggcgtcgctggaggcgtttcttgccgcgccgctgcggatgccgctgcacctggggttctcttatgatgaggaggttggctgcctgggcgtgcgcagtctggtggattttctccgcgcctccgccggcaaaccggcgctgtgcattatcggcgagccgacagacatgcgcccggtctacggccataaaggcaagctcgcggtgcgctgccgcgtggaagggcacgcctgccactcggcctacgccccggaaggggttaacgcgatcagctacgcggccaggctgatttcccggctggacgcgctgggtgaaagccttgcgcagcagcaggatagccggttttcgccgccctcgggcacgctgcaggtggggacgattcacggcggcgcggcgctgaatatcgttccgcaatcctgctggttcgactttgaaattcgctatttacccggcacgcgcccgcaggccgtgaccgacgccctgggcgattatgcccgcgagcagctgcttccggcgatgcgcaaggtggcgcagcgcagcgatattcatttccagacgctgagccactatccggggctgctgagcgacccgcagtcagagttcgcccgctggctggcgcagtggtgcggcagcgacgatttcaccaccgtcgcctacggcaccgaaggcggcctgtttgacgaggcgggcgttgcgacgctgatctgcgggccgggcagcatggctcagggccacaaggcggacgaatatatcagcatcccccagaccgaacgctgtatggcgatgctggaaaacctttgcgcctggatgcgcgccgatccctccgattctcttcgctgatttatcaacacaggatggcgactatgcaaaacccgaactccccgcttattgatcaacagaccgtcgaccgctggcaggccgacggcgtcgtgctacttaaaggcgtgttcacgccgtggatcgagagcctgtcgcgcggcgtcgccgcgctgatggcgaaccccagcgagtacggtcacgcgcgaacggtgatccccgaggacggctcggcgccgttttttcaggactattgcaactggcaacgaatcccggaatttcgcgattttgtttttcagtcgccggcggcggagatcgccgcggcgctgatggggtcgcagacggcgaagtttttccacgagcacacgctggtgaaacagcccggcggcagtacggtaacgccatggcaccacgatcagccctattactgcgtggaggggcggcagaatgtcagcctgtggatcccgctcgatccggtagcggaggcgatttcgctgcgctgcattcgcggttcccatcgctgggacgatgagttcagcccaacgcggtttaacggttcaaagctctattcccattcgcgctttaaagagctgccggacattgatgcccatcaggaggattacgatatcgtcagctgggcgctggagccgggcgatgcggtcgcttttcatttccgcacgctgcatggcgcaaagggcaattcaaccgcccgcgcgcggcgggtattttccgcccgttgggtaggggatgatgcgacattcgccgaccgcggcggcgtgacgtcgccgccgtttccggggcttaagcttcgcgacggagagccgcttgtcgccgatgagtttccgcaggtctggccgcggtagcggcggcagggcgggcgaggacccgcccatcttgcggcgaaaggttttcactcactgactgaggggattgaagctccttaattttttgctttaagggctaagggaggaaattgatatgactcggttactcgtggttatgatctcttagaaagacggtcagtacgtccttgggtggggtgacaccactttctgaaagtagccaacctacagcgccgcgatgatatgttccgtgaaacagcacatgattgagcatatcaaccgccttcatctcaccaggtccgccatcgacaaactggaatttaatggtttcagcaaggtcaacgggggacatagcattgacgtattgaatataccagtctgtacattcagtcattgttctcagaagttcatcggcagagggcgtctctggcgtgttcagtgcggtgtaggagtgcttctggccggtaatgttagcgcggaagatcatatcaaccacatgtatgtgattcattaatctgagcgtcagatggcgtttttctgcattcgcagacgcatcaatttttttaatcgcttgtagcgtttcaatatctatccagcgtttgtatctaaacagcgtagctattttgtcagtacccatgcgtcacctcttttatctattttgtgattatatcagtaacattcagtatcgctggcagggcggtactgttgctttagcgtaggccgccgtcaggtttatatgccgtttatgacgtcagccgatagtgcgactgcaccagtcccgaagggaagctgcggcttgataacagcgtcaaatcgatatccctggtcagggatccgaacaatggtattcccgaaccgagcaggacaggaacggtcgtgataacgatatcggcgaccagaccttcgcgcaggaacgactgtattacctgcccgccatccagatagacgcgatgcgcgttttgcgccgccaggtcagcaagcacttcccccggcgtgcggcttgagagctgcactttgcccttcagcgcctcgggaatggcggtatcggttagctgtcgggagagaaccagcacgggtcgatcgtaaggccattggtcaaaagtcagcgctttctcatagctcccccggcccataacgatccaatctttgtccgcgatgaatgcggcatagccatgatcttctgttgggtcatcgcgctgcaacagccagtcgatatcgccatcctgtcgggcgatataaccatcaagactgaccgcgataaaaacatgtgtggtgaccatcaagtgctccgtatacagcttatatttatgccgttgagtttagggggaggtgttttgtccacataatatgattcaagcttttccagccaaaatattcaacatgcggcgcaatggttccgctgctccccacaatagctgatcgccgaccgtcaggaccgagtagatcggttcattgtttagcgacattttcttgtaacgaccaatacccaccttaagcgaaccgctgatacaggccggtgtcagggtactgacactctcttccttgttattgggcacatagttaacccaggggtgggaattcatcactaattcggcaaattcctcttcgttgacttcacgcttgagcttaagggttatagcagcgctgtggcagcggatcacgccgacgcgtatgcataagccgtttaccgggatcgtaccgggagacaggcctaaaattttgttggtttccgcctcacctttccattcttcacggctattgccattgcctaaatcgctgtcaatccagggaatgatgctgcccatcaaaggtgcaccgaagttctgggtcggcatatcagcgctgttaatcaattcactgaccttattaactaacggaagcactgaacctgaggatgccagctcatccggagataaatggcggcttatgtaggcactttgcgcaatgagttcccgtacatactgtgcaccagcacccgatgcggactggtaggtcatcacactcatccattcgatcaagtcagcctttatcaacccagccagccccataagactcagcgtaatggaacagttgccgccgacaaaaagtttaatgccttctttaattgcacgatcgatattgttgcggttgacggggtcgagaataatgcaggctttctcatccatccgcagcgctgaagccgcgtcaatccagtagccttcccagccatggttaagcaaagcagggtatattgctttggtataatccccgccctggcaggtgatgatgatgtccatttcggccagcgcacttacggaattagcatctttaagtgtgtagctgacgccatcaatgacagggccggcggctcctgcactggaggtgctgaaaaaatgcgctgatatattgtcgaagtcgttctcttcgatcattcgctgtagcaaaacagaaccgaccattcctcgccaaccaacaatgccaacctgcttcatttgcttaaccctaattacgttatgagaatgttaattttcttcgaggcacgttatatctcattccaaattaaaggtcattacgaacaacatccgattccatcattattaaaatctttcatctggcatcagcgatttttatctctttcacagctaaaaaatcataacctgttgacctgcggcatttgtatttaaaggcaagaacaggcgtaagacatccgcttctggcacacaacagccagactgaacaaagccagggtttgcaatgagcggggagcggacgctggtttaccgcgccttgtcatggtaaatatctggcagcaagagccgtgcttcgttcagttaatatagtggaatcgatttttatttgaggttatagggaaaagccgctctatgatctttcctgtccctgatagttaatgaataagtaataaatgaaggttagcaaataatgaagtcagttcagccaacaatgattgccgccgccgaaactcgcggcggtaggggagtaatggtgactgacttccgataaaacagattctcacgccccgccaaacctgacggggaaggaaatctctccgttcagaacgttctgagacgtcaggaggcgcgactatagtctatccagctcatgtacagtacgttcattgacgatattgcccgtattcagcgtcgtttttggctcaagtaaaacgacgcagcactcttcagttaacgcttcaggacaatgctcggttcctttcggcacaatgataaactcacccgcttcaagcacgatatcgcccgttcttaaccccattcgcaagcggccgctgataacaagaaaaagctcgtcctcatgctcatgatgatgccagtcaaactttccggctaacttagccagtttgacatactcgttattaatttcgccgacaattttggggctccagcattcgctgaacagagcaaaactttcttttaaattaactttatgcactcatcttctccgtcatatatataatccagatggatttatttggcatagtaaaagaaccgacaatggtagcgcggtgcgctaccggaagatcgatattcattgctaaaaaaactccggcagaccaaagataaattggccgtaacatggccagctttctggcgctaacaactgcttcgcattgcggaaaatacagcgcagggaagccggtgctgttgttcgaaataacaatacagtcagcccgcatgcagaacaatgggtttcccggttacgggcgcaataatttatcaatacaaaatcaatcggctgaatttacttcattttatttataaaagaattttccgcctggctttcaggagagcgtttttgtttctttaagtgaacacatgctcgctcttcggcattttatcagggggctcctggccagataatcgcgtagaggagttaacctggctcgaggtgagtcatcaccaccgttgcgctaatcgccgtctctcttgagctgtatgtgtgcgcaacctgcgcggagaaagcgtaaaaatccccgggttctaatgtgatgacttcgtactgactaaagcgcagatgcagggtgccgctgtgaaccagaatatgttcatgcgacccgtctgaatgcccgggactgtggatggtgacctgcggctccatttgcagcaaccatatctcggaggtattgccggggccgatgcggaatttcatcatttgtgaatattcgcccggcgcgggacgatgcttatcaaaacagggatatatcctgctgccgccgctcagtaaatcgccaaccggtaaacgtaatgcagtggcgatagcgtccaacgtatcgacacgggggctggaaaatcctgactccagtttggataatgccccctttgaaacccctgacaatttagacaggtcgtttaacgaaatcccccgtgactgccgcagtcgtcttattttattgccgatatttaatgacaacgcagcaggtttatcgtgtcctgaatcagccattattgcgaccctccccgagtgtggctttctcatatgaataaatgcccgcccagttgtgatcgcggtaaggacatgacgatgctgtcgccggcctgatatagcatagctgcatcaacaggcagcaatttatcacgcgcccgcaatgcctggatactctatttatccattcagatgaccccccctggggtttacagactcatgaggggccgcctgaaaaaagggaaatattgcacatcaagtaaaattttagcgctcagaatttgatgggctgctttgaacgatgagccggtcttcaatgatttgtatcagactctctgacgagagttccattggtcgcgagtggtttcccggatagcggtgtttgtcctgggatttgagtattggcggcatcttccacgatagttttacattccggccatgtaagcggccggaagtatcgtttaaacccgttcagaatacgcttttagcatggcaaggagcgcccgtcgtgccgcatcgtccgcgatattttcaggcagcgcatcagcgcggagattgatataagcgtcaaccgccttgctgatggcgatgctgacggagtcacgatcgtgcgtggccagcgtggaggtcagcaggccctcaggatcgatattgtggcattcaatgcggcgaaccccacgctgcggtagattggcgcggcggtacagcatcggtcccagcacttgctcccggaagaatgacagcatacccatcgcttcgaaaagttcgccccttcccagtttaaccaccgcataatgaagccagatccaggctcgggactcaaaccactccggcgtcatgtcaggccactgggcacgaaattgtgccagatgtcgctccagggcatggcgatcgcgagaaaataacactaccggctcctcaacgcgttgagtgagcatgtccagggtgacaaatttcagatcgacatggaggagttcagggccatacaggcatatcagcaggcgaggctctccgacatgttccccggtgaacgcatgcagcaggttgcctgcagttccggcgaacgccacacgctgcgccatgatttcatcatagtaaagagggtctactacaacgacaaaatccaaatcggagtatttatcaaatccgccatgaataagcgagccgcccgcgagcagggagtgaatccgggcgtcagactgaacgttaagcttgagttgctctgcaaaacttctgtgtaaatcgggtaacgtactaagcatactttttcctgttcacaaaaaatacaaagcattacagaatatcgagttcggtatattcgggccagatatttttgcaggaagcgtcgtttcctcattgagtctcgggtccactatgggtggatagcctgagccacgtagcccgatcctccgctacgcccgccgtcagggctttcaggcaggatggaaacgctggcggatagtcccgccaccagttcaatcccttccggtatcttatctaactgaatacgaacggggactcgctgcgcaagtcgcacccagctgaaggtgggattgacatccggcagccccagcccgccggtctcgtcattgctatcatcgatcccccggccgatactctccacgtgcccggtgatgagcgggtcaaaccccatcagagaaatgtgtgcggcgctcccgacgcgaatatgacgcagcttagtctcttcaaaatagcccaccacccagaaactgtgcgcatcgaccacggcgacctttgtttctcccgccgcggcgtagtcgccggggcggagccgaagatgcgtcacgtagccggtaacgggggcgcgcaccgttgcatgggataagttcagctgcgccagttccagcgcagccagcgccccctgataattggccgccgcgacgcgcgctgcgctgcctgtttgctggatatcctcgccggaaatgacccctttgatgagcgcgcgtcgccgggcggcatcctggcgcatcagcatttcatgacgttttgcttcgacgtcggcctgcgcgctgagcaccgccagcttcagccagcgcgggtcgatggcataaagcacatcgccgcggttaacccactgattatcccgcaccgccacgctgctcaccggcccggaaacatccggcgcaatctgcaccacatctgcccgaacccggccatcgcgcgtccagggcgtctgcgcatactgtttccagaaaataaacgccacgcaggccgctaccgctactgcgattaacgtcagcgcgtaacggcccagcaaagagaaaaaagatttcatgcgaataaccccagtgtggtcaggccctgcaaaagcaggaaaaaggtcacgatataggttgaaacatcaagcagcgggcgtaagggcaagcggcggtaaagcctgctgcaggagaaaagcggtacgagtaacagcgtacagaccagggcaatgagcgcggtcagcagcagtccggggataaaaacgcccccgatattgatgtcatttatcatgggtgggttcctcgttctgcgtccgtaacgcgcagtgcagatcgaccagtcggtcgacaaactggcatgatttttcctccctcgcgggcaagcagcggttcgccatggcggcaatgcgctcgcgtaaggcttcggtctccgttgtgtgggtaagacgagaaagcacctcgtggatatcgctgccggcgggcgtttcgcaacggcgcaggcgcataacgcagaggcctatgcgcagaaagtgcaccaggcgatcgagcgcccgggcggaggactgcccgctgcgcggcaagcgtggcagcagcagggcggcccggtcgatcatcagattggtccagtgcgtttcatcgcctttaaatacgccgctcacgctgcggcgaatatcgcgttggcacagtttcagcagacgctttatcgccgcgtccgcctgtacggtttgcagcagactcatgccgataaccgcaaagccggtcgcgaaaaacagggcgatcgcggtgttggccgcgtcggcgaagtcgccgctgtagcgcgcgcccagctcgcacagtaccggcagcgtcagggtgatccccatggccataaaggtcgtggggggccgcgcctgcagcgagccggcaagcagatagaccggggcaagcaccgccaccagcacggggaaatcgctgagcggaggaagcagggcgaagctatagataaggcttatcactacgccccagacagagccgataatatatttcacaatatgcggggccggcgtgtcgaaactgccaaacagcgtgcagcaaaccccgagaatcgacaccgccgtgccgccatcgggccaggcagagtaaatccatagcagacagccgctcagaatgatgacaaaagcgcccagcgccgtgcgggcggcgctcaggggatcgcgatggaaaacgtatcctgtcgccgcacgatcttccacctgcgctggcgcaggtctggcgtgatgaatggcctccgaaagccgctcacactgctgcaggagggtaatcaactcagcgatgtagcgtaagaaatttacccgcagcgcatcttcaaaggtcagcgcctgcgccgcgagccgctgcgctaactgcgcgctgcgctgttgcagcgcttctgcggcgtttttgcgttggccggtatcgtcgcaggtcagccaggcctgcacgtcattcagtagagtctgcatcgcggcgggcatcccggcgatggtctgcaaacgatcgcgtacttcgccgttgacaatcaccaaccgcgccagcctgtcatggagcgctttcctggcctggcgggccggaaccgaaagggcaaaatcatacgggatatggtggctgatgccctgcagaaactgtagcgccagcgccagatgcagcggctctgactgcgcgtcggccttgcctgccagggtgtcggcaatccgctggcgcgcggcgtgcagcgtctgggctaatttgctgttgaacagccctgatatccgggcaggtaaaatgtagcggtgaatcagcgcggcgcagacgataccgatagcgatttcctgtacccggatgagggcgatgttaaacaccgtgccgggatcggcgacggcgggaaaaccaatcaggcttgcggtataaccggccagcacaaaggcataggcgcggggcgtgcgttcaagcagggataaatagaggcagaaggtgatccagcctgccagaatcacgctacagagaattggcgtattcacaaacgtcggcacaatcaataccgtggcccccgcgccggccacggtaccggccaggcgataaaggcttctgctcagggacgcgcccaccgaggtttgcgacacgatgtagacggtgatgatggcccatgagggccgttcaaggccaatcgccagggcaacgtaataggcgagcatcgcggcggcaaaactcctgacggaatagagcagggcatgggcgtcgctcagcagcgagggagaggctatgcggcctgaccaacggcttatcgcgtgtaaaaaacggctgtgatgggaagttaatgtgctcatgccgggaattattcccgctttgcgcgtctccttaaatactctattctgtcaaaaaatacctaaatgttgccaatgagatgccatccagacttgcccataccctgtttgatcccgatagcacgccgagccctgccgtcgcgcggcatattgatttcgttgattacgcggcagaagtgccggttcatacccaccgcaagggacaactgatcgttgccctctatggggcggtgatttgtcgtgcggaaaacgatatctggatagtgccgccagactgcgcggtgtggatccccggcgggatcccgcacagcgccaaagcgacctggaatgcgcatctcaactatttgtttattgaacccggcgccgccgcgctgccggataaatgctgcacgctggcgatttcgccgctgattaaagcgttagttgaccgcttaacgaatgcggacgtcgattacgccgcggagagccatgtcggcaggctgaccagagtgacgctcgatgagctggccaccatgccgcagcagaaactgagcctgccggtttcggcgcatcctaagatccgcgccatggcggatgcgctggtcagccacccggaggatcgcagcacctttaaagtttgggcgaaacggctggcgctcagcgagcgctcattagcgcgcctgatgctgcgcgaaaccggcctgaccttcgggcgatggcgtcagcagctgcatttgattattgccctgcgggagctggcaagcggggtatcggtgcaaaacgtggcggctaatctggggtatgagtcggtcaacgcgtttatcaccatgttcagaaaaacgatggggagcacgcccgcgcactactttgccggtcgaagaacggcagatccctgagcggcgcgcaggctggatgcggagtgaggcgcttaatatccgccgcggccacagcgtcgcggcgagcgcaaaatttagtcagagaagggcggggtcggctggcttaatccagtcgtatccgggttgccgatgctgcggcgccatgcgccgggggcctggccgaactgacgcttgaagctgcggttgaaggactgctgggagtcaaagcccagggcgatcgccacgttcaaaatcggttcgtcgctgtgggctaagcgctcgaccgatttttgtagcttttgcgcgcgaatatactcggcgagaggataaccggtatgctccttaaatagccgctgcagatgccatttcgaatagccggctcgcctggcgacggtgccaatgtccagacggctatcaagattgttgtcgatccagtcgagtaaatcgtgaatgaatgcgccagtgttcatctgatgtacctctacgcagcgtctaaaaaagcatctttatctgttgcatttaaaggtggcccgtttttgcactaattgcaagttttattgttgcatttaaatccatgtcggaaacgcgccatttttaggcgccaggaatagcacataaagtgcaacaattattcttgcactaaatttagcgccttcctacaatcgccgcgatagtgtattcgcaactgttacagttttgtggcgatgaacgacacaaatggccttaagccagcccggacaaaggaagtggcgcggtgtcttccgctgcgtcttgcccggcggctaccaataccggaataaaaataatgagcctgcaaaaatactggggtaactttcatctgactgtgccgggcgtgatgctgctctcggcgctcctcgttggatgcgatgagggcgtcgcgcaaaacgccgcgccgcaggcgcccgccgtcagcgccgctgatgtggtcgtcaaatccattagtcagtgggacagctttaacggtcggattgaagcggtggaaagcgtccagctgcgaccccgcgtctccggctacattgacaaagtgaattacaccgacggccaggaggtgaaaaagggggaggtgctgttcactatcgatgacagaacctatcgcgccgcgctggaacaggcgcaggcgacgctggcgcgagccaaaacgcaggccagcctggcgcgaagcgaggctaaccgtaccgataaattagtcaataccaacctggtctcccgcgaagagtgggagcagcgccgcgccgcggccactcaggcgcaggccgacattcgcgccgcgcaggcggcagtcgacgccgcgcagcttaacctggacttcaccaaagtgaccgcgcctatcgatggccgcgccagccgggcattgatcaccagcggtaacctcgtcaccgccggcgacagcgccagcgtgctcaccacgctggtgtcgcagaagacggtttacgtctactttgacgtggacgagtcgacctacctccattatcaaaatctcgcccgcagcgggcagggcgcgtccagcaatcacctggcgctgccggtggagattggcctggttggcgaagagggctacccccatcagggcaaagtggattttctggataatcagttaacgccgagcaccggcaccatccggatgcgcgcgctgctggataacgcgcagcgtcagttcacgccgggtctctttgcccgcgtccgcctgcctggcagcgcggaattcaacgccacgcttatcgatgataaagcggtgttgaccgatcaggatcgcaaatatgtttatgtcgttgataaagagggtaaagcgcagcgccgtgatattacgccgggccgtctggccgacggtttgcgcatcgtgcagcaggggctgaagccgggcgacagagtcattgtcgatggtctacagaaagtgtttatgccgggcatgccggttaacgcgaaaaccgtggccatgaccgccagcaccgccctccactgatcccttgacctgagaatccaacccatggacttttcccgttttttcatcgacaggccgatttttgccgccgttctgtcgattctgatttttatcaccggattaatcgccatcccgctgctgccggtgagcgaatatcctgacgtcgtaccgcccagcgtgcaggtgcgcgcggagtatccgggcgccaacccgaaagtgattgccgagaccgtggcgacgccgctggaagaggcgatcaacggcgttgaaaatatgatgtacatgaaatccgtcgccggttctgacggcgtactggtgaccaccgtaaccttccgtccgggtaccgatcccgatcaggcgcaggttcaggtgcaaaaccgggtatcgcaggccgaagcgcgtctgccggaagatgtgcggcgtttagggatcaccacccagaagcagtcgccgacgctgacgctggtggtgcatctgttttcgcccggcggtaaatacgattccctgtatatgcgtaactacgccacgctgaaggtgaaggatgaactggcgcgcctgcccggcgtcggccaaattcagatcttcggctcgggcgaatacgcgatgcgcgtctggctcgatcccaacaaggtggcggcgcgcgggctgaccgcgtcggatgtggtcacggcgatgcaggagcagaacgtccaggtttccgccgggcagcttggcgccgagccgctgccgaaagagagcgacttcctgatctccattaacgcccaggggcgcctgcataccgaagaagagtttggcaatattgtcctgaaaacaacgcaggacggtacggtcgtccgcctgcgcgacgtggcgcgtatcgaaatgggctccggcagctatgcgctgcgttcccagctgaacaataaagacgcggtcggaattggtatcttccagtcgccgggggcgaacgccatcgatttgtctaacgcggtgcgcgccaaaatggacgagctgtcgaagcgtttcccgcaggatatgaaatgggcggcgccttacgatccgacggtatttgttcgcgattccattcgcgcggtagtgcaaacgctgctggaagcggtggtgctggttgtgctggtggtgatcctgttcctgcaaacctggcgcgcgtcgattattccgctgatcgcggtgccggtttcggttgtgggtaccttcagcattctctacctgctgggcttctcgctgaataccctgagcttgttcgggctggtgctggccatcggcatcgtggtggatgatgccatcgtagtggtggaaaacgtcgagcgaaatattgaggaagggctggctccgctcgccgcggcgcatcaggcgatgcgtgaagtgtccggcccgattatcgccattgcgctggtgctgtgcgcggtgtttgtgccgatggcgtttctctcgggcgtgaccggccagttctacaagcagtttgcggtgacgatcgccatctccacggtgatctccgccatcaactcgctgacgctctctccggcgctggccgcgctgctgctaaaaccgcacggcgcgccgaaagacttcccgacccggcttatcgaccgtcttttcggctggatttttcgtccgtttaaccgctttttccaccgcagctcgaacggctatcaggggctggtgggaaaaacgctcggacgacgcggggcggtgtttgtggtctatgtgctgctgctctgcgcggcgggcgtcatgtttaaagcggtacccggcggatttataccgacgcaggataaactgtatttaatcggcggcgtgaaaatgccggaaggttcttcgctggcgcgcaccgatgcggtgatccgtaaaatgagcgaaatcgggatgaataccgaaggtgtggattacgcggtcgcgtttccggggcttaacgcgctgcagttcaccaatacgccgaataccggaacggtcttctttggcctgaagccgttcgaccagcgtaaacattcggcggcggaaattaacgctgagatcaacgcgaaaatcgcgcaaatccagcagggctttggcttctctattttgcctccgccgattttagggctcggccagggttccggctattcgctctatattcaggaccgggcaggtcttggctatggtgcgctgcaaagcgcggtaaacgcgatgtccggtaccattatgcagacgccggggatgcacttcccgatctccacctaccaggctaacgtgccgcagctggatgtccaggtcgatcgtgataaggcgaaagcgcagggcgtgtcgctcaccgatctgtttggtacgctgcaaacctatctgggatcgtcttacgtcaatgattttaaccagttcggccggacctggcgcgtgatggcgcaggccgacggcccgttccgcgaaagcgtggaggatattgccaatttgcgcacgcggaataatcagggcgaaatggtgccaatcggcagtatggtgaatatcagcaccacctacgggccggacccggtgattcgctacaatggctatccggcggcggatttgattggcgatgccgatccgcgcgtactctcttcctcgcaggcgatgacgcagctggagaaaatgtccggccagatattgccgaacgggatgaatatcgaatggacggatctgagcttccagcaggccacgcagggcaatacggcgctgatcgtcttcccggtggcggtgctgctggcgttcctggtgctggcggcgctgtatgaaagctggacgctgccgctggcggtgattcttatcgtgccgatgacgatgctctccgcgctgtttggcgtctggctgaccggcggcgataacaacgtgttcgtacaggtggggctggtggtgctgatggggctggcctgtaaaaacgcgattctgatcgtggagtttgcccgcgagctggaaattcaggggaaagggatcatggaagcggcgctggaggcgtgtcgcttgcgtttacgtccaattgtgatgacctctatcgcctttattgccgggaccatcccgctgatcctcggccacggcgcgggcgcggaagtgcgcggcgttaccgggatcacggtgttctccgggatgctgggggtgacgctgtttggtctgttcctgaccccggtgttttacgtgacgctgcgtaaattcgtgacgcgcggtaaacctgctgaggacgtttcgccggcgtagggtgcggcagataacaaaaaaccgccttcactgtgaaggcggttttttttgcgctcaaggaaaattaatgggcttctttatatttggcgataagttcaggcaccggatcgcacccgctggtatcggcttttttcacctcttccagcgcgcttgccacggtgtggcgtgccagtacctgtagcgaagcctgctccgcttcatcggcgatagatttgaagtaccagcacgcgttcgcgctgaccacgcagcgggcggggacgtcagggcgcgacgcccacagttttttatcttcgataacggagacgtagatatcgcgcagggtgatctcttccgccgggcggccgagatgaatagagccgttgcggccaagcgttgagacaattatgccgtcacgcgtgagaggaaccatgagtttgcggataaagctcgggttcgcttccaggccgtaggccagaatcgcgctcgtcgaacgttcacccaactgctccgccattgctacgctgagaaccatctgcaaagctgtcgggaagcggtaatctaacattttcttatcctgggtagcggtgaatcttgttctttttggcaccgcagaggtgagtaagcaataaacaacaatataccaaatacggtaatttttttgaagcaatctgcgcttttcccaccaggtaaaaaagcgtaagtgagagcggggccagccgacgcttcacgccatggcgtgaggcactgatgaaaaaggtatcagcatttaatacccgctcgggcacacaggacccccggggtcttaatgggcgtttaccgttgaagttgaatgaggtgggtagccatcccccatctgagtgcggcgcatttgccgtccgtaaaatcgaaaacagagtaactcgcattggggtgagcatagcgagagaagttatcgagagccccctctttaagtatcgccagcacgccctgactgacatgcccgtgagaaacaacacagacgatctgatgtgcactggtattttgcaggtgttgtaagaaatttatcacgcgtcgagtcgcctgggctaacgactctccctccgggggacaataggctgcatcaaggaagagcaacgcatcggcatcacgcggattgtttcgcctgaagtgctcgaaagatatcccttcaaagcaaccaaacgactgttccttaagagattcttcaacttttaacgggcagccaagaccttcagacagcttcagccccatgtgcaaggcgcgcccaagcggggagctgtaaacacattctattggatatgcctctttcgtcagcgctgtcagtaacgccgctgtttcttgcataccgcggtgggttacgaagctgtcgcgatgcccctgaataatccctctatgattccactcggtttctgcgtgcctcacccatatcactttcatcgtatttgagatccgttatccaatgtgaatacccgtttgtttatctgattcagggcgaaagtgtagcatggtgaacgtttgaagccggtttctggatattatccagcgataatgtccgcttcacgccctgagacattcgacaagctttctacggcattagtaagggcgattttcgcgcttccagtgccagcaaatatttcgcttcgtcataacgggttctggtcttccagcagcggtaaataatccttatccatttgaatgccagagctcggatcgctgattgatgagattttcctttttctcgcagcccctgataatacagcttggcccagtatgatgagttaaccgtcttggcagcccattcgacaaaggtttgcctgacgaacttggcacactgccatcgccagtgaacccaggatttctggccactccgttcagtcaccggagcaatacctgcgtagttttgaatttcctcagcgctgttgaagcggtcgcggttatcacccagtgcggcaagcatacgtgggcccatacacggccccatgcccggtagtgatttgaacagctctgcatccggaagcgtatcgaataacgattcgattcgttcgtcgtaggttctgataagttcacctacaagtttgatttgtgatgcaagagctgttgccattagcgcgttcgcctcgatgacacttttatcagtggtcaggggaatcgcgttggcaatgcttgtaacccgctgttctgtatacgcaacagcgggaccacctcttgcgttcataaaatgacggacggtattactccgggcacgtttgagctgttgtaggcttggccagcggattatgagctcacagaacaatgaactgtcccgatgcgagaaccattccaggggttgaggataatactgcttaagcgtgttaatgagccgattaacaaagcggcgtttgtcttctaccagcagcctacgctgctcgactagttgtagaagtaaacggatatcagcattgtcgggttcgatggctttaatcttttgggggtagcgtagcatcagatctaacgccaactcggcatcctgaggatcatccttcgcgccacttggccagaaggtctgccgatagcgggccaatgataacgcgtgtacaggaaagacagtaataaaggggtacttctggagagcatatactaccgggcctttcttcagttcaagggcgatagcgatcctgcctttgaccttctggtgcaactcattgagccaggtatcaagcgcttccggcgtatggttaatcacatggaatgtgcgctcaccgtttttaaactgaacgcagacatcgtgctttttatccgcccaatccagaccaacatgagcagcaaactgatctatagcagtcatcaccaactccttttaaacggggattggtatgcattccacgcccttcgaaagaaatatagtcagcagtttatctgcatgccctgagtattcgttagcgaacgtggagcacttactggctcgaaagcaaagcggcaatcatcagatcacatgattctggcacaatattcgtaaccagtaagcgcataccctgaatcacttaaaagtgtaaccctcagggttcgaatgactatatctggcacaaagcgctgcctaccaaactcaccccatgtcctgtcgcggtgtattaaacaacggggagccactcagcttaagcatgtacgtttgctttatactaagatatttatccaacataggcgttaagatatcgtctcaggatcaagatggatttatcagcatgaccagaacagaaaggcttctcgaattactacagatattaagggcgcaaagatatccgatcacggcttcagctctctcagaaagattagaaataagcgtgcgctccctttacagagatataaaaacgctacagcagcaaggtgtgtgcattgaagggggggctggaattggttatatcgttaagtctgactttcatttgccgcctttaaatctttctcatgaagaaattaatgctattatacttgggctaaactgggtttctcataatacggatcatgatttcaaaaaaaacgcaaggaatgcgcttgctaaaatacatgccgttattcccggtgaattaaaaaatcttattgagagtcaatcctatctgaccggtcccacagaaaagaatgaggtgttttttgaagacttgcgtgatgcgattaaaaaacgaaagagaatcaaaataaagtattgtgataagagcaatgttaactcttctcgagtcatatggcccatcgcattggtatatatggagtcatgctggcttttggttgcatggtgtgaaatgagaaaggatttccgtcattttagaacggacaaaatacaaggcattgtgccgctggattccaggtatagtgaaagcaggttagttttattgaataaatggagaatgaaagaggggatcggcctggagaaagagtactgacaaaaactgtcactgcgaatttgtatacttcctcagatgtaagactcaatgctacgtcataggggggattgtgaattttcaaaataaagtggctgttatcaccggcagcactgcaggtataggcgaggcagtcgcagagcaattacacaaacatggcgcgaaggtcgtcattgtgtcccgctcgtcagaggaggcgaaacaaaaagcgaaacaattgtcttcacagggacaaccagcaatggggatcggatgcgatgtgtcacagcccgaacaagtacggcaaatgatagatgacgttatcaactattttggcaggcttgattatgctgtcaataatgcaggcataacaggtgagcatggtaaaaagataacagagcagacagttgaaaactgggataaggtcattgccacctcattgagcagcgttttttactgcctaaaatacgagatacttcagatgatgaagatggggggcgctatcgttaatttatctgcagtaaatggtctggttggcattcctgggctggcgccttacaccgccgctaagcatggtataattggtttaacccaaaccgcagcgctggagtttgcatgtcaaggcattcgcatcaatgccgtcgctccgggctatgtccaaaccccacgaataagcgaattccctgaaaatatcgtacgcagtttcgcaaatagccaccctatgaaaaggatggcaaaaatgcaggaaatcgcagacttcatattgtttttgttgtcagataaatcagcgttctgtaccggaggcgtttatcccattgatggtggttttttagctgagtgacattcccgttaggttttttaaagcctccgttttgccgcgtcagaggccaggggcatgccgggccgttccgtcaacgtcagcccggcgctggctatcactgatatttggcgaccagatactcctcttcgctgcgtcgccagaaatgtgaaggaataaacggggatatatactcatacgagggcgcgaagaaggatcgtacctgagcccggcgataaaaaacgtattgcacatatccgggagccgctggagcggggaacgcccctgaaaaaaagcggcgggccggtgatatttgctgcacgcttttccctcactatctgctacgggacagcataccgcgtcgtatgctgccttgccgttcttttcgttaacccggagttcactatgaacacgttgtcgtttttacattccgccattaatcaacgtctgctgctgccagtggtgtttgctctgctgaccacgccggttttggccgcaggtgacaatagtaccaatagcaaaacgccggactgccccagcggtcaggtgtatgacagcacgaaaaaacagtgcgtacctgaaaaaacaagccagctcagcgatgaagataaaacgcgttatgcctatcatctggccaaaaaaggggagtaccaggcggccctggacctgctcaacaccctgaaaaatggcgataccgcggaagcctggaattaccggggctatgccacgcgtaagctgggccgtaccgatgagggcattggctactatcagcgttcaatcgcgctcgatccgacctatgccaaagtacgtgaataccttggtgaagcatggctggcgaaaggccgtcctgacctggcaaaagagcaattgaaaactatcgccacgctgtgcggctatagctgcgaggagtaccgggatcttcaggcagcgatcgacggtcatcctgagtcctgaataagagtatgaggataaaaaaattacgaccagcggcgtccgtcagcatcttgctgcacatctgacacgcctgtggcgctatgggttggttctgtcgcgtaaccgagaggttgtcgaagagcgggttcagtctgcctgtgtccgcgcgcttgaaaaaagcgcgcggttcaccccgaggaggcggccgacacgttgcccgtcccgattggttaccctatcctggttttatctccaattgaccggccccgggcaatagccgctgtcaatgttccctggccaattcgtggcatacgataccgagctgttctacggcatgcaaaagcgcgggggtgggttcattcgcaccgttcaggcgcaggtagttttgcagttccgccgcgcccggggaaaacagcggccccggactgacgccaatgcccagggcgagtgcgcgacgatgtacctccagcgcatctatcctggaggggagttgtacccaaatcaaaaagccggcttccggagccgcgacgcgcgtgcccggtgggaagcaggcttcaactcgggtgatgatggcgcgcataccttccgcaatccgcagcttcaggtgccgcaggtgcctgtcgtaatcgccgctggcgaggatctcgtttgccgcggcttcaatcagcggcgcgcctgcccattctccggccatgcgggcctgcaataccgcggagtggtagcgtccggcagcaatccagccaattcgccagcccggcgccagggttttcgacagcgaactgcaataaatcacatttccgtccctgtcgaaggctttacacgcgggcggacgctgagcgccaccggccagatcgccatacacatcgtcctcaatgagcgggatgcccttatcggcgagcagcgccaccagcgcctgtttgcgcgccacgggcatgctggcacccagcggattttgcaccgtgggtgaggcaagcacggccgcagggcggtggcgctggatagcctcttcaaggggcgccaacaataagccttcaatcgggtctgtggggatctgtaacgccttcagacccagatcttccagcagcagaagcgtgccgaagtaggcgggctgctctatcgcgacagcatcgccaggctggcataccgcgcggagcgccagacgtagcgcctgggttgcgcctgccgtaatgataaggtcatccgcgccaaaaagagcgccccactgcgcagcgcgtgcggcaatctttctgcgcaggtccgctcttcccgggggcaggctgtagctctgcccgcgcgcatcaagccgacgaccggcggtgtgcagcgcccgctgtagtgcatccacgggaagccaggcgggatcgggtagcgcggcgccaagcggcaccagacgcgcttcagcgctaccgaacagcgaccgggcaatggcggacatagtcaccggcaccggcccgggcaaagaggcagcgcgctgttcgtttccggaggcggctggctggcggacaaaatagcctgaacgcggtcgcgcgataatcagaccctccgcctcaagataacgcagtgcttccagggccgtggggaggctgacctgttcgcgttcggccagtttacgcgcggagataatgcgatcgccagcccgtaaaacgcctgaagcaagcgtcagccgcagcatatcggctatacggcggtagcggggcgtcggcggggatatttcggacatcgtcatctgtatagtctgctttttgataaatctgactatacaggcgaagcggggcgccatctatagtgtgttccacaccaaccagccggggaaatcatatgcacagcgacagttttgacctttcactttacttccgccgcataggctatagcgggcctgcggcagcggataccgcaacgctacacgcgctcatgcgtcaccagctctttgccatccccttcgaaaatctggacgtacaggcaggtaaaatcgtgtcgatggagcccgatgatattgccaacaagctcttacggcagagacggggcggctactgttatgaactcaacgggctgtttaccatggcgctggaagcgctgggcattgcctggcggtttgtcgcggcgcggcccatgttctatcccgcgcgccggcctaaaacccatatggcggtcgtcgcggaagtcgagggccgtcagtggctttgcgaccttggctttgggagctacggtattcgcgcgccgctggccctggatgaacttgatacggacattatccaggatttcgatacgttccggcttagccgcgatgcgcacggcgactatctgctgcaggcaaaagttgagggaagctgggccaatcaatatggttttgacctgtcacctcaggaatggattgattttgctccggccaatttccttaactccacgcaccccgacgcggtctttgtacaaaagctgctggttatacagcatcagcccgaggggcgctttattctgctgggcaatacgctcaagagcattaccgcggatcgggtagaaaagcagcggctggaagacgatgaaattgcgcatgtacttgagcagcgctttgcgttgtctgcccgctaattaatcaaaggggccaatgagtccggggcggaacgggcacgaagcagggatgccgggggagccatcgcgatcgccatgaggtgggagtgaccgcttccccgtgcccctctcaatctgttcatctgctgcgacatcagcagcgggtgattatttacgttgccggcgggtatatgaaatagcagataatgcaaataaaaaactaacgccacttttaataaacaaggctattcagttaattaccactacaaaaataagataattctatctgagctggccaatctgtatccgtagtacatatttccgccacacaaccccctgcgcctggaaattcattgctaacaagtagttacagctgcgcggcaatatttttggcgataaaaaatggttaaaataaaatcatctactaaaatcaaattgttgattaaattcatacaatgctcgttcgtattaatttagataattggctttgtgtcgaatgcccaaaatttaagcagcgggtgatagctgctgacgataattatcccgctcgatattgccctgggtctggcaggtaaattcctgctctggacgtttgtgtaaaacgacaccgggctaattgagttatttcaaaggacaacgtaaatgacgaatatctacgactctaccaatataagcagtcaggaagcagccaggcacttgcctgcggctgctgtaaacagcgcgagcgcggtttcatggggggcgatatttgcaggcgccgccgctgccgcctcgctggcgcttatgctgctcatgcttggcgccggattaggcctcacttcaatctctccctgggaaaaccaaggtcttgcggcgggtaccgtcggtattgccgccatcgcctggctgacgtttacccaaattgtggcgtcaggaatggggggatatctggccggacggcttcggactaaatgggttgatacgcataccaatgaaatctatttccgcgatacggcgcatggctttctgacatgggcggtggcgctgctggtatcagccgttcttttaaccaccaccatcagttcactcatcggcggcagcgcaaaagtcattggttccgttgccgggggcgcgacggcaaccgccgtgaataacgcgggggagggatcatcgatgttatcgaagtcatcgatggaatattttacccgctcgctgttcagggctagcggctccactccggcaggtaacagcaacgcatcaggcaatgatgttatggccatgaatcagccggcgccgccaaaggcggagtcacccgctcaattagccgaggtgacgggcatttttgctaacagtatttattctggcgcgcttcccaaggatgatctgacctatgtggcgcagttggtttctcagaataccggcatcagtcagcaagaggccgagcagcgggtgcaggcggtttatgataaagcccaggctaatttgaaagaggcaaaagataaagcgcagcaggccgcagacgccgccagaaaaaccaccagctacgtcactctgtggtcatttatttctctgttaattggcgcttttgttgccagtctctgtgccacctatggcggccgtcagcgtgatttataacgtctaatactcattatacgggaggaacctatgcgttcaatattgcttttctttctgggtgtgccaattcctatcattattttaatcgcgctatttgtgcactgactattttccggccccgcaggaatcgtggttaagaaaatactgaccctcgcacattaccgctaaagcataaatgcccgtcgagggcatttatgctttttatcaggcgctcagaggagcctgctgcgcgtcaccagggaagctctccgcgacagagtgatgtcaactagcaataacacccgcagtgaattaacgctcacgccttgccatcatcagcgccaggtcaacgaggcggttagagaagccccattcattgtcgtaccacgccagaattttaaccatattgccgccaatcaccagcgttgacagaccgtcgataatcgacgagcgcgggtcaccctggtagtcgctggagacgagcggttcatcgctatagccgaggatcccttttagcggccccgccgcggcggcttcacgaaaggcattgttcacctcttcggccgtcacctctcgcgccagcgtcacggtcaggtcgacaatagacaccaccggtaccgggacgcgcagcgagtatcccgttaagcggccatccagctcaggaataactttgcccagcgccttcgctgcgccgctggagtaaggcactatcgacagagcggcggcgcgagcgccgcgcagatctttttccggctgatcgtgcagggcctggctgttggtgtaggcgtgggtggtgttcatcaaaccgtgcttaataccgaaatgctggtgcagaacctgcgcggcaggcgccagaccgttggtggtgcagctaccgttgctgaccacgaagtgtttatccggggagtagaggccatcgttaacgcccatcacgatggttaaatcatcgtttttgccgggggcggagataatcacgcgctttgcgccaccgctgtagatatgcaccgccgccttgtcgcgatcggtgaagaacccggtggcttcaatgacgatatcgacttcatgctgatgccacgggatattggccgggtcgcgttcgctgaatacggttatgggtttaccgtcaaccacaagctgcccttcaccggcggtgacgtcggcgtcgagcttaccgagcagcgagtcgtatttcagcagatgcgccagcgttttgctgtccgtcaaatcgttgatcgccacaatctgaatatccggatgacccagtgcagcgcgtagtacgttgcgtccgatacggccaaaaccgttaataccgacctttaccatgattaactccttatccattgtctctggcgtcagagtaggccgggcaggctttggcgtaaatgacaaaaaaggatcactttacgccattttgcgacagtgaaatcgctggcgatattccccgggtgtgaggtgaagctgtttttcaaacagccgtcgcaggttaatgctgctgccaaatcccgtttgttcggcgatacgatccagggtctcgttagtttgctccagacgctgccgcgcggcggccagacgggcttcggcgacgtagcgcgccggcgaagcaccggtttcccgggtaaatacgcgggtgaaattccttggactcatggcgaccctttccgccagtttatccacgctgagatcggcggtgaggtttgcgagcaaccacgccagcagatcgttaatagggcccagggtgctggtctgctgaaggttgtagcggctaaactgcagctggccgccgggacgacgcaggtacatgacgaaatcctgggcaatatcgcgcgccaggctgaagccgtagtcctcttcaaccagcgccagggtgagatcgaagccggaactgaccccgccagaggtccagatgtgttcgtcctgaatatagagcggaccgccttcgacgcgtacctgaggaaattccgcctgcagggtatccagtagcttccagtgggtagtggctcgcctgccgtccagcagcccggtttgcgccagcagcagggctccgccgcaaatggaagcaatgcggcgggcatggggagccgcaaggcgcagccagtcaaccaccgcaaccccttcctgcgggttttgacctctgccggtaatcatgatggtatcgagcggctcgcgagggtctatctcatgcaggcgatgatcggccagcagatttaaaccggactgaccatggatcacctgatgcggctgggtggtcgctagctggacctggtagcagagctccccggcgccttccgggtgcagacggttggcctgcatcagaatgtcggcaataccggcggattcaaacagcatgccgccatccgggacaataataagtatcttcttcatgtcctgaaaagtaatctttttacagaataagtcaacagaacagacgggggagggggagtttctgccaccgcagcgacgctctcgtctcgctcgctgatggtgtgacgtcgacgggatggggttgcctgctgaggtaggtctcgcacaaactggactggaaaaatagtaccgaatctccgctatgagctaatagcagacataacatccccgggatagtttgggaaaggatactcttccagcatcagtttcggttcatgctttttgggacaggatactttatgctggttactctcatttataggatacgaccatgataactgtagagaaatccgatccattttcttcagaatcccatcgcttaatcgaaatgctatcagctgaacttgccgctattacgggggatagtggcaaaagcaatttcaccgttgaagcaatgaatgatgacaaagccttgtgggtattggcaaagaatactcatggcgaagcaataggatgcggcgctattcggccgataacgcaaaatatagccgagcttaaaagaatgttttcagaccgaagcgtgccaggagttgggggagctttactcacttttctggaaacatctgcaaaagatatgggttatagcgaactcagactggaaacccgacacatcaaccatcgggcagtaaatttctacgagaaaaatggatatattcgtattgaaaattacggcccctatgtcggtaggacagaagccgtatgtttctcaaaagcattgcgctgattgtattaattggacctgctttccgctccaggcacaacgctgtctaccaaactccaccaatgcccgtttagctatagcgttaaggctgtgagcataaagacagataacgataatgcgcaggatcgtgtgttgcgctcatgcagaaccatggtcatcgcggtttctgcatcgaaacggagcagccggcatgttcgaggaggggactcctccggagaaaacgtgcggagtatacaggcaccttaaagggagcatttttccatggcgattcactgtgcctgtctctggccgatatattcctctaatccctttgccaggacatcgaaaaccaatttgcagcacagactattgcgcaggtcttcgtgcatgacgatccaggtatcaagatagaaagaaaagaaattcggcagtaacctccgcagtggaacagagccattggccaactgcacctggcatatgccaatgccggccccggcgcgaataagattcagctgagccacgtcgctgtcggtgcgcatggaaaatgcattccggcttagctgagggaatttttccagggccttacggatgaaaggcgtatcctgatcaaagccaatcagcgcatgtttcagcagatctttgctattttcaggcgtgccatgtcgtgcaagataggacgtcgatgcgtggagaccgagttcaatgcggccaacgcgacgcgcaataagctgttcctgtactggcgtcgtcatgcgtacagcaatatcggcttccctgtgcagtaaatcctgaacccggttcgacagaactaattcaatcgttatttgtgggtgagactccctgagcctggcaataagcggcggcagaacttcaacgccgataacgtcactcgcggagacgcggacgacgccatgaatggacgtgctgttatgactaaagttggaggctgtgcgcgctagcgtattcgcggtgctctccatcgcttcggcatgcaccctcagcgccagcgccgtttcagtcgccagcaagcccgtctgcgaccgcgtgaacaacacctggcccagagcggactcgagcgcagcgatatgccgtcccgccgtaggctgcgtaatcgaaagcctgcgtgatgcgccggaaagcgagccttccctgagcacagccagaaatgttcggtaccactcccatgggatagatgtattcatacaaatttgtatagctgccctataaagatatgcaattcaatttagctctgcctgtacgtacgctgtcaaggtcaaatcagcaaagaggcagacaatatggaaacccgaggcaaggtcctgatacttggcgcaaccggcggaatcggtggtgaaacggcgcgccggcttattcagaacaaatgggacgttcgtgcactaaaacgaggacttcatggcagtgaacgacgtggtgacatccagtgggtagggggtgacgctctcgacccggagcaggtcgccgctgcggcagcagactgtagcgcgatcgttcacgccgtcaatccgcccggctacagaaactggaagcatctggtgctgcctatgctgcgcaacacgattggcgcagcagaacgaaccggcgccttgatcgtgcttcccgggaccgtttacaactatggtcctgacgcttttccgctattacgggaagacgctcagcagacgccggtcaccaggaagggagctatcagggtacaaatggagaaagaactggcggcctattcgcagcgtggcggacgggtattgatcgtccgcgcgggggatttttttggtccgcgcgccggtaataactggttttctcaaggtctgattaagcccggcaagctgcctggcgtcattaccaatccagcttcgtttgcaaccggtcaccagtgggcttacttacctgatgtcgcggaaacgatagctgcgctgctggcacgacgcgaggagcttgagccctttgcacgttttcatatgcaaggtcactgggatgccgacggcagcgaaatggtcagcgcgattcaacgcactgcggcacgctatggcggcatggccaaaatacaatcatttccgtggtggttgatgtacctggcagcacctttcaacgcaaccttacgcgaacttctggagatgcggtacctgtggcgccagccggttcgcctggacaatacgaaactggtgaattttttaggtgccgagcctcacactcctcttgatgaagctgtccatgcgacattacagggcctgggctgcattgatcgtaccgagacaaggtagcggtactgccagccactcatcggctggcacaccgtgccaggacgtgtggcataacgctaaaggcgctggcagaccagccctttattctggcgacaggcggatgcgccgttaatggcaaaagcctgatggaaaaggcgggtctgcaacttgttgatatacgcgtgacggtacgcgactggattagcgcctgtaagctggtcgcggaagggatgggcgtcgccattgtgcctgaatcagccctgccagaggcgttgcgcaatctgtgcgtggtgccagtgacgcctgccatacaccgtgagtttcggctggtctgttcgtcatccggaacgtcttccggcgcaacgcaggcgctacttaacgcgctacgtaaacgaggatgagcgggcatgcggcgaaccggatcgtcagcgataagcgacaaaccggcttattgtttatatcggcgcaggctggaggcgggatgccaaaggagggctgattcggggcgtattgggcggcgcaccagctctcccccacagttcgggcaatggccttgcagctgctgagtcacgcagtcaacgcaaaaggtgcattcgaatgaacagatgtacgcgcttgttgattctggcggcagatcgttatcacagcattcacaattagggcgaagttcaagcatggtgatctcctgttattaaaggggcgtcatgagcgctcgaggggcatctgcctgtcccgtattcgaaccgctgcgcttaatctgcacgagatgagcatgatcgacaggtcgaaaaaagcaagagattgagtggcttatcagtaccaaccgcttctggcgctggtggttgggggaaaagaccgctgagcctgtgcagcgtgagaagaggacgttaatagaggaataaaaacatcgccagatttgcccgtggcggctacagttaagattatttaactggtatgaccacataggcggatatcttttatgaacctgataacaatccctgtaaatcagggggatgttctggctgccacagtatgggagagaagcgatgctaaagcgctggtgatcctccatcctgccaccgcggtatcacaggcgttttacaaggacttcgctgagtacctttacgcaatgggattcaatgttctgacctacgactatcgggggataggtcattccaggtcaggcacgctacaacactgtcatgtctctatgtccgactggatcgagcaggatgtcggctgcgttaccgcctgggcaaagctgcgtttccccaatcttctgctgatggcggtagggcacagcgttggcgggcacgctattctgctttcgacggccacccggtcgctgcatgcggcggttcttgttgcttcgcacgctggcgtcacccgcacaattaaacaaacgcaggaaaagctcagagtctggtttgtattacgtattctggcgccggttctgtgtcgtacctttggctatatgcctgccagacgcctcgggctgggggaagatttacccgcgcccgtcatgctgcaatgggggcgctggagtgccatgcccgactatttttatgacgatcgcgcctgggatgcgcgccgacgggcaagcgaagtcacgttaccccttctggtactcggttttgatgacgatccctgggctaattctgcagcgattacgcgcctgctggcgccggtggaaaacgcaaaaattgaacgccgcgagatccggcacgcggattatggtattccggccgtcggccacatgggctttttccgcacccgatgtgcggaaaaaatatggcctgaagtcggtcgctggctggagagacagtgtcaacccccgggataatgtcttcccggctatttttcttatagtcgaagagattaacaggacatggtatgccgtaaccgtcggtgctcaggtttcaaagcggcaacaggcgcatccggggaaatagttcatcgcgactcagagagatatcatgtctgttcaaaaaagggcaaagaggatgcactaagatgctggcttatatcactataggtacaaatgactttcagcgctccgtggacttttatgaggctatttttaaagttcttggctactcacgactgccagcctggacagaaagctgggcaatgtggggagatgaaaataatccacatgaggtgttcaacttctgtatttgtcctccttttgaccagcatcccgcaacggcgggaaacgggacaatgttcgcattccgtgcagacagcgctgaccttgtcaggcggtttcatgcagcaggcctccttgcgggaggggagaatgaaggcgagccaggtacacgaaccgcatacggccccgacttttatgttgcctatctgcgcgatcctgacgggcataagctggcatgcgtttgtcagcattattctcctgaagcagataagttcgtagatgaacaatagggacttcacttaacacatttaacggtttgagcattgataaagcctggcgatgaaatgcggcgtttgcggcgaactcgctcaatatcgtttacggctgccaccgtttgctcccggcccttagccgtccgggctaattaacccccgcattaaagctgccgggctgattatggtgcaggagagcggagcgacagggcattttcctgaataagctgagaacggcgatagccccagaccctggttgtatcgccgtttagcgtctaagccaccttactccttcttctcgcccagcgtcggcgtctcgtcaaagaagttccacggtttcagcagcgcgtgcgcccactcggtcggcataatcggccactcctcggcgcgagccacgtgggtggtgccggtggtgatccacaccacgtcatcatggttgtccagcgactcgtcatctttcgcgtactggccgaggccggtgtcgtgaatcgaacggttagggtacttgccttccgggaagcgctcggtgggatgatagcgggtgacccacagctgcttatccataaagctcagacgatgataaatccactcatcaggggcaaattttgccccggtggcgaccggatgcgtgccgcccgcgtaggggataatctgatacgacaccgggttacccatccggttttctttcgtgatattgctcagcagacggatggtgcccgggtcaaatttctgcgccgctttctgctcgctatcaatcgtgtactgattgatctgcatggtgctggtacgcggaccgccggcggtattcggcttcacttccgggtccatggccaccagcgtgttgttctcgccgtcaacgtcaagatcgaggcggaagttataaatatgctggtgggtggtgccgacaatattatggtcaatcagcgtgccgtagcgggtgtcctctttggcgctcgggtcatgcatggtcttcgcctgcacgcctttcaccgcttcgatgccggtcgccccggcatcaatgccgatggtgccgttttcgtggaatacccagtcaaaaatatagtcgtagttgccgacggtgctgatccagcgcaccaccagctcgcggcgctcggtactgacgtttggcttgcccatctcctgatgcttatactccggcccggcgtagcgttcgaagatggcgattgcgcgcgggatggtcgtgggcgtgccggtatagtcggcgatggtttcatccagcaggaccgcgttggacggcgcgtccttgccgcgcacgataggcgaggtcagggtgcccatgccgtagtcgccggagtccagataggctttaaaataccagcccacgtccgggtcgccgtagggcacgatcatcccgcccagcgaaccttcatacatcacctgacgtttcttgccgttatcgttatatgtcacggtggagagaatcggcccaacgcgggagttcatgcgcaggtggaaatcccagttttgccagtggatcatatcgccggtaatggtgtagtttttgccctctggctcaatgatatccagcggtttaatctttggcgcaacgcggtcgcgaccatcataggggcgggccgccatcggcaccgggatcgtcggcccctcttcgattttgatgatcttcttctgctcaaggtcgaccaccgctaccaggttttcaatcgggtgcgcccagtagttaccgtcgccaacgtcaagatagctgaccactttcagcagccgcgcgtcctgcttgaggccatctttgccgtcgaagtagccgacggttagcggggtggtaatcaccttgctcgggtcgtcgatgccgtgtttttttaacacttcggcaaattcgctgctggcgttgatgatgttctgcacgctggcgaaatcatccagcagcaccatgccgtgggcgtctttaatcggcgtccatgaaagcacctttttattctgtaaatccaccaccgcctcaataacgtgcttgccgtcgagcatgatcacgtcggcagcgcgcggggcgttgaccggcgtaccgttgagggcaaaatcccacaccgcttttttatccggctcgcgcagggagatctcggtgaatcgggtattgggtttgaaatccgccgcggctttaacgatagcgaccgctgcgctgatttccgccgctgacagcgagttcagcggatgcgggcgtttttccacctggaaggtctggtcaagaccggactgaaacacgtcgttgataaaggtgtcagaaacccacgctttgccgtctttcatcactaccggcacctgcagctccagggttttaccattgacgatggccgttttcgcccccggttttacctttacgtaagcgccgtctttaatcagggtaaacatctgcgcgtagtcatcccactgaacgtccgcgccaaaatcctgcagggttttgtccatcgggaccatatgggcttcgccgccgtgggcgaacgccgggctttgccaggcgcaagacagagcgacagccaacgccagagccgttttgcggggagaaagaatcgccattgagacctcaccttattgttgtgttgtgcagtgccgctgcgaatgtcggcttgtgtatcgttaacctaacagcggtcagcgccggggcgtttgcctgcttttgccaggttgtttgtcagttttgccagttacaaaaaatgcctccgcagaggcatgaagatggcgataaagatgggcgaatttctaatatttactccgcaaaatccccctgctggcgggccaccagggtcaggatggagtagagcgcgaccgcctgctggtgctggttaaaaatctctaccgcccactcgacgacgccggtcgctttctcctccgcgctgcgctggcgtttcaccgttttgcgtttgcaggtcaggcgtacctggatggtatcccccggcttcaccggctcgataaagcgcagattttccattccgtagttggcgatcaccgggccgaccccggcgtcaacaaatagcccggcagcggcggaaatcaggaaatagccgtgcaccacgcgctcgccgaaaatcgactccgcggcggcaatcttatccatatgagcgtaaaagtgatcgccgctcagacaggcgaagttgacgatatccgcctcggtcagggtgcggcgcggcgtcagcaggctgtcgcccggctggatctcctcgaaatatttacggaaagggtgaatgcggtcttccactacctgcgcgccgcgcacccactgctggccaatggcggcgagcatcgtcgggctgccctgaaccgcggtgcgctgcatatagtgcttcaccgcccgcaggccgcccagctcttcgccgccgccggcgcgccccgggccgccgtgtaccagctgcggcagcggggagccgtggccggttgattctgcggaagattcttcgttcagtatctgaatacgcccgtgggcgcgggcggcgccgagaataaacgcccgcgccagttcgccgctggcggtcaccagggttccggccaggctaccttcgccggcccgcgccagggtcatggcgtgctcaacgttctgatacggcatcagagtggcgacgggaccaaacgcttcaatagcgtgtaccgccggggtctcgtccggctgcgggcagtacagcagcgttggcgggaagaaggcgcctgcggcgctgaaatcggcctggccccccagcagcacgtcacatccagcggccaccagacggttgacgttatcctgcacgtcctgacgctgttcgtggttcaccagcgcgcccatcttcacgccttcctgcgccgggtcgccgaccaccactttttgcaggcgcgcaatcagcgcgtcgctcaccgctttcacctgcgcctgcggcacgataatacgccggatggcggtgcacttttgcccggccttcgccgtcatctctcgtaccacttcgcgaataaatagcgcgaactccggctgcgccggcgtgacgtcgtcaccgagtacgcagcagttcagcgaatccgcttccatggtgaaggggatggacttcgtgaccaggttgggatgcacccgcagctgctgtccggtacgggccgagccggtaaaggtgaccacgtcctggctatcgagatggtcgagcagatcgcccgcgccgccgcagatcaggctgattgccccctccggcaccagcccgctatcaacaatcattttgaccatcgcctgcgtcagctgcgcggtagcggtagccggtttgacgatggccggcataccggcaagccaggtgggcgccagcttttccagcatgccccagcaggggaagttaaaggcgttgatatgtaccgctacgccggattttgacgtgagcacgtggcgggcggcgaagcctccctgttttgacagcggaatcagctcatcttccggccacagggtatcgtccggcagctcgcggctgccgagaccggcgtaggcgaaaagggtgccaatgcccccttcgatatctacccagctatcggcgcgggtggcgccggtttcggcggagatcgcgtacagctctgccttctgctccagcaaatatctggcgagcgccttcagcatcgcgctgcgctcaataaaggtcatcgcccccagcgctttgccgccgcgctcaatcgcgaagcgtcgcgcctgcgccatatccagacccgcgctggtgacttcccatagcgcttcgccgctgatggcgtgatggatggtacgcgcgtggccccggccggtctgccacgcgccggacaagtagctggctaactgctgcatggttcatctccagatgtgttacgtgaaatatctataaatagttctttggtgaatcataaaaatcaagctcgcatttaataatttattaacattgtgatcggtgatgatctgcgttatgcacttaatatcttgttaataagggtttttacaaaagcttttgcggtcgctatcacaaaaagaacaaacaaaatttgtggttttatttaacctgaatgtaacttttataaaacaaagtgattcgaaaattatttttaatcgaatttattggaatcataaaggtgatgacgtgacagaagaacaacgctttgaccagcgcatcgcgcaggagacggccatcgaaccgcaggactggatgccggaagcctaccgcaaaacgctgatccgccagattggtcagcacgcgcactcggaaatcgtcggcatgctgccggaaggcaactggatcactcgcgcgccgacccttaggcgcaaagcgattctgctggcgaaagtacaggatgaagccgggcacggtctgtacctctacagcgcggcggaaaccctcggctgcgcccgcgaagacctgtatcagaagatgctcgacggcaagatgaagtactcctccatttttaactacccgaccctgagctgggcggatatcggcgtgattggctggctggtggacggcgcggccatcgtcaatcaggtggcgctgtgccgcacctcctacggaccctacgcccgggcaatggtcaagatctgcaaagaggagagctttcaccagcgccaggggtttgaagcctgcatggcgctggcgcagggcagcgacgcgcagcggcagatgctgcaggacgccatcaaccgtttctggtggccggcgctgatgatgttcggcccgggcgacgataactcgccaaacagcgcccgcagcatggcgtggaaaatcaagctccattcgaacgacgaactgcgccagcgctttatcgataacaccattccgcaggtggaaatcctcggcatgaccgtacccgacccggatttgcggctggatgaaaccagcggccactaccgctttggcgccatcgactggcaggaatttaacgaagtgattgccggacgcgggatctgcaaccacgaacgcctgggcgctaaacgcaaggcatgggaagagggcgcgtgggtgcgggaagccgcgctggcgcatgcgcaaaaacagcaggctcgcgacgccgcgtaaggagaatgaagatgagcaaaaactactggccgttatatgaagtgttcgttcgcagcaaacagggactgtcgcaccgccacgtcggcagcctgcacgccgccgatgaccagatggcgctggaaaacgcccgcgatgcctatacccgccgcagtgagggctgctcgatttgggtggtgaaggccagcgaaatcgttgcctcgcagcctgaagagcgcggcgcatttttcgacccggcggagagcaaagtctatcgtcatcccaccttctacaccgtgcccgacggcatggaacatatgtgaggccacgatgaaaaacgataaccccgttgccgcttatgccctgcgcctcggcgataacggcctggtgctggcccagcgtctgggcgagtggtgcggccacgcgccggagctggagatcgatctggcgctggccaatatcggcctcgacctgctggggcaggcgcgccatttcctcagctacgccgccgaactgaccggcagcggcgatgaagataccctggcctttggccgcgacgagcgccagttttgcaatttactgctggcggagcagccaaacggcaacttcgccgacaccctcgctcggcagtttttcatcgatgtctggcacgtggcgctgttcggccgcctggtcggcagtcgcgatgcgcagcttgccgccatcgccgccagggcgctgaaagaggtgcgctaccaccagcgctttagccgcggctggctggagcgtctgggcaacggcacggcgttttccgcccagagaatgcagagcgcggtggataacctgtggcgctttaccggcgagctgttccaggccgatgagctggaaattgagctgagtgcgcagggcatcgccgtcgacccgcgcgaactgcaggccgaatggcagaacgcggtgcacacggcgctgatcgacgccggtttgcagatcccgcaagaagcggctttccgcagcggcggtaagcaggggctgcacagcgaacatctcgggccgctgctggcggagatgcagtatttacagcgcgcctatcccggccagcagtggtagcaggaggggattatgcaacgtctggttgatatcgcgcccccggaggtccacgccgtctgggatctgttaggcgccattgccgatccggaagtgccggtgctgaccattaccgaccttggcctggtgcggagcgtggagcgccgcggcgatggctgggtgattggcttcacgccaacctattcgggctgcccggccaccgaacatctgctgggagaaatccgcgcggcaatgacggaaaacggctacgcgccggtgcatatcgtgctgcagcttgacccgccgtggaccaccgactggatggggccggacgcgcgtgaacgcctgcgccagtacggcatcagtccgccgcagggccatgcctgccatgcccacatgccggaggacgtggtctgcccgcgctgcggcagccgccacacctcgctgattagcgaattcggttccacggcctgcaaagcgctgtatcgctgcgacagctgccgggaaccctttgattactttaaatgtatttgaggttgcgatgacgacatttcattcgcttaccgtggcgaaagtggagccggaaacccgcgatgcggtcaccatcacctttgccattcccgacgcgctgcgtaatgcatacgccttccgtccgggccagcatctgaccctgaaagcgcgccttggcggggaagagctcaggcgctgctactccatttgccgcagccgctcgccgggtgaaatcagcgtggcggtgaaggccatcgacggcgggcgcttctcgcgctatgcccagagcgacattcagcaaggcatggcgctggacgtgatggtgccgcagggccacttcggctaccagccgcaggccgggcgttgcgctgactacctggcgattgccgccggctccggcattacgccgatgatggcgattatcgacgccaccctcgccaccgaagtcgacagccgcttcacgctggtttacggcaaccgcagcagccacagcatgatgttccgtcaggcgctggccgacctgaaagaccgctatccgcagcgtctgcaggtggtgcacctgttcagccaggagtcgatggacagcgatctgctgcaggggcgcatcaacggcgacaagctgcgcgaactggccgcccatctgctggacttcagccgcttcgagtacgcctttatctgcggcccggcggcgatgatggatgaagcggagatcgccctgcgcgagctgggcgtaccggaggacgcgattcatctggaacgttttaataccccggacagccgcgccaggcgggctaccggcgtacaggcggagggccgcgcggtcacgattcgtcaggacggccgcgaccgaaccattgccttgagcgcggaggatgacagcattcttgacgccgcgctgcgccagggggcggacctgccgtttgcctgcaaggggggcgtctgcgccacctgtaaatgcaaagtgctgcgcggcgaggtggcgatggccgctaactacagccttgaagccgacgaactggcggcgggctacgtgctgagctgtcaggcgctgcccaccagcgacgatgtggttgtcgactttgacgcgcgggggatggcatgagcgaactgttcattgctcgtcacgcgcgcgtactgcagctgacgctaaatcgcccgcaggcgcgcaacgctttgaataacgcgctgctgacgcagatcgccgacgtgctcgacgcggcggcgctggacccgtcggtcggcgtctgcgtcatcagcggtaacgaacgcttctttgccgcaggggctgacctgaacgaaatggcggaaaaagatctgcccgccacgctcgatgatattcgcccgcggctgtgggcgcgtatcgacgccttcagtaaaccgctgatcgcttcggttaacggctatgccctcggcgccggatgcgagctggcgctgctctgcgatctgatcgtcgctggcgataacgcccgcttcggcctgccggaaatcaccctcggcattatgccgggcgcgggcgggacccagcgcctgatccgctccgtcggtaaggcgctggccagccggatggtcttgagcggcgaaagcattgatgcccatcaggcgcagcgggcggggctggtatgcgaggtttatccgccagcgctcaccgatgaatatgcactcgctttggcggcaaccgtggctcgccactcgccgctggcgctgcgcgcggctaagcaggctttgcggttgtcgcaggaggtgagcctgcaggccgggcttcagcaggagcgccagctgtttactttgctgagcgcgaccgaagatcgccgcgaaggcatcgacgcctttttacataaacgtactgcggaatttaaaggacgctaatcgtggaagctttcattctcagcgaagtggaacagggcgtgatgacgattacccttaatcgcccggaccgtctgaacagttttaacgacctgatgcacctgcagctggcgacgtgcctgaaacaggccgaacgcgacgacagcgtgcgctgtttactgctgaccggcgccgggcgcggcttttgcgccgggcaggatttaaatgaccgcaacgttaaccccagcgggccggcgccggatctcggtttatcggtcgagcgtttctacaaccccctggtgcgccgtctggcggcgctgccgaaaccggtgatttgcgcggtgaacggcgtcgcggcgggcgcgggggctacgctggcgatgggatgcgatatcgtgctggcggcgcgttcagcgaagttcgtcatggcgttcagcaagcttggtctggtgccggactgcggcggcagctggtttctgccgcgcgtggcggggcgcgcgcgggcgatggggctggcgctgctgggcgatagcctgagcgcggagcaggcggcgcagtgggggatgatctggcaggtggtggacgatgccgagctgaaagacaccggcctggcgctggcccggcacctggccgcccagccgacctatggcctcgggctgattaaaaacgcgctgcggctggcggaaacccagaccctggaccagcagcttgatctggagcgcgactaccagcgcctggccggacgcagcgccgactatcgcgaaggcgtcagcgcttttctggcgaagcgtccacctcacttcagcgggaaatagccgatgagcacaacgttacctaccgtcgcggtgataggcagcggcaccatgggcgccggcattgccgaagtggccgccgccgccgggcatccggtactgatttacgacatcgcccctgaggcggtggttcgcgccatcgacgggattcgccagcggctggcctcccgcgtcagccgcggcaagctggcggcggaacaggccggggcgcttctgacgcgtctgtctccggctgaggatctgagcgctttagcccgtgcggagttggttattgaagccgcctccgagcgcctggacgtgaaaaaagcgctgttcagacagctggccgaaatctgctccccgtcgacgctgctggtcagcaacacgtcgtcgatatcgatcaccgccatcgccgcgggaataaaacacccggagcgggtcgccgggctgcacttctttaacccggccccggtaatgaagctggtggaagtggtcagcggcctggccacctcggcggaagtcgttgaacagctctgcctgcgggtcagcgactggggaaaacagccggttcgctgccgctcaacgcccggctttatcgtcaaccgcgtggcgcggcctttttatgccgaagcgtggcgagcgctggaggagcaggtcgccgcgccggaggcgattgacgccgccctgcgcgacggcggcggttttcccatggggccgctggcgctgaccgacctgattggccaggacgtcaactttgcggtgacctgttcggtatttaacgccttctggcaggaccgccgctatctgccgtcgctgctgcagcaggagctggcgctggccgggcggctgggtaaaaagagcgggcagggggtctactgctggcctgctgaggcacagcctgagctggagctggccgccgtatcggcagaacgggcagcaaagcgtataaaacgtgacgttgtcaccgagctggacgaggtgctgctgctggaaacgaccggtgaaaccgccctggcgttaagccttcagcacggccgcccggtggtggtctacgaccatagcgcaggcgatacggtggtgctggccagcgcggaaaccacctctcaggcggcgatcgataaagcgactttctattttcagcagcagggcaaaaaggtgctgcagatcgccgactatcccggcctgctagtgtggcggacggtggcgatgctggttaacgaagcgctggacgcgctgcagaagggcgttgccagcgcggaggatatcgataccgccatgcgtctgggcgtcaactacccgcacggcccgctggcgtggggtgaatcactaggctggggccgggtgctgcggctgctggaaaacctgcagcagcactacggcgaagagcgctatcgcccctgttccctgctgcgccagaaggcgctgatggagagacatcatgagcaatgaagcctggcacaacgcccgcgcgatgtacgagaacgataactgtgcgaaagcgctgggaattgaaattatcgcgatggaccagggctacgcgcagatgaccatggcgatcgccccgaacatgctcaacggccaccatacctgccacggcggacagctgttttcgctcgccgataccgccttcgcctacgcctgcaacagccaggggctggcggcggtcgcgtcggcggcgagcatcgattttctgcgtccggcctttgtcggcgagctgctgaccgcgacggcgagagttaagcatcagggcaagctgaccggggtctatgacatagaaattgttaaccaacagcaaaaagttgtcgctctgttccgcggtaaatcgcaccgcatcggcggcacaatcacaggagaagtctgatgcgcgacgcctttatttgtgacgggatccgcacgccgattggccgctacggcggggcgctggccagcgtgcgcgccgacgacctcgccgccatcccgctgcgcgaactgctgagccgtaacccgaagttcgatccggcatcgatcgatgatgtgattctcggctgcgccaatcaggccggcgaagacaaccgcaacgtggcccatatggcgacgctgctggcgggctatccgcacaccgtacccggtaccaccattaaccgtctgtgcggctccggtctcgacgctatcggcttcgccgcacgcgccatcaaagccggagaggcggatctgatgatcgccggcggcgtcgagtccatgtcgcgggcgccgtttgtgatggccaaagccagcgccccctggcagcgccaggccgagctgtttgataccaccatcggctggcgttttgtgaacccgctcatgcagcagcgatttggcactgacagcatgccggaaacggcggagaatgtagctgaattgttaaatatcagccgcgccgatcaggacgctttcgctttccgcagccagcagcgtacggctcaggcccagcgcgacggcattctggcgcaggagatcgtaccggtaaacgttgtcgacaggaaaggagcggtacacgtagtgcgcgacgacgagcatccgcgggcggataccaccattgaacagctttcgcggctaaaaacgccgttccgtcagggcggcgtagtgaccgcgggaaatgcctccggcgtcaacgacggcgccgcggcgctgattatcgccagctcgcagcaggccatcgtccaggggctgacgccgcgggcgcgtattgtggcgatggcgacggcgggcgtcgagccgaagctgatggggcttggaccggtaccggcggtacgtaaagtgctggagcgcgccgggctgagtataaacgatatggatctgattgagctgaatgaagccttcgccgcccaggcgttgggcgtgctcagacagctggggctggaggatgatgccccgcatgttaaccccaacggcggcgccatcgccttaggccatccgttgggaatgagcggcgcccggctggcattaagcgccagcctggagctgcagcgccgcggcgggcgctatgcgctgtgtacgatgtgtattggcgtgggtcagggcattgccatgatccttgagcgagtgtgagcgaatctacctgcgagtaccctacaaaatgacaacgataactcaattagacccgattgaaaccgcatcgcgcgacgagctacaggccctgcaaacccagcgtctgaagtggacccttaagcatgcgtatgagaacgtgccgatgtatagccgtaaatttgacgcggcgggcattcatcctgacgattttcacgaactgagcgatctgagcaagtttccctgcaccaccaagcaggatctgcgcgacaactacccctttgatacctttgcggtgccgatggagcaggtggtgcgtatccacgcgtcttcgggcaccaccggcaagccgacggtggtgggctatacgcaaaacgatattgataactgggccaatattgtcgcccgctccctgcgcgcggcgggcgggacggcaaaagacaaaattcatgtcgcctacggctatggtctgtttaccggcgggctgggcgcccactacggtgcggaacgtttaggcgcgacggtcattcccatgtccggcgggcagactgaaaaacaggcgcagctgatccgcgatttcaagccggatatgattatggtgacgccgtcctactgtctgaacctgattgaagagctggagcgccagatgggcggcgacgccagcggctgctccctgcgggtgggcgtgttcggcgcggagccgtggacccatgcgatgcgggcggaaatcgagcgtcgtctgggtatttcggcgctggatatctacggtctgtcggaggtgatggggccgggggtggcgatggagtgtctggaaaccgccgacggtccgacgatctgggaggatcacttttaccctgaagtagtgaatccggacaccggcacgccgctggcggacggcgaacacggcgagctgctgttcaccaccctgactaaagaagcgctgccggtgatccgctaccgcacccgcgacctgacgcgcctgctgccgggcaccgcccgcaccatgcgccggatggatcgcatcagcgggcgcagcgacgatatgctgattatccgcggcgtgaacgtcttcccgtcgcagctggaagaggagatcctcaagttcgaacatctggcgccgcactatcagctggaagttaaccgccggggtcatcttgattcactttcggtgcgcgtggagctaaaagagagcggtctggcgctgaaccacgagcagcgctgtcagatttgccaccagctgcgccaccggatcaagtcgatggtggggatttcgaccgatatcagcattgttaactgcggcagcattccgcgctccgagggtaaggcctgccgcgtgttcgatctgcgcaaggtggccgctaacggataacgcattctcccggaagcggcgcattgcgcctgtccgggctacccgatgccgcaactcccttggcctggaaagtggtagcccgggtaaggcgtttacaccgcgacccggggagtgtgccggggttgatgtatcagctctgcttcttcccggctcgcgctgcgcttagccgggctacgaattcaccgttgtctgcggggccggtagcccgggtaaggcgtttacgccgcgacccggggagtgtgccggggttgatgtatcagctcggcctcttcccggctcgcgctgcgcttagccgggctacgaattcaccgtcgtctgcgagccggtagcccgggtaaggcgtttacgccgcgacccggggagtgtgccggggttgatgtatcagctctgcctcttcccggctcgcgctgcgcttagccgggctacgaattcaccgccgtctgcgggccggtagcccgggtaaggcgtttacgccgcgacccggggagtgtgccggggctgatgtatcagctcagcttcttcccggctcgcgctgcgcttagccgggctacgtgttcaccgtcgtctgcgggctggtagcccgggtaaggcgtttacgccgcgacccggggtgtgtgccggggttgatgtatcagctctgcttcttcccggctcgcgctgcgcttagccgggctacgaattcaccgttgtctgcgggcgggtagcccgggtaaggcgtttacaccgcgacccggggagtgtgccggggttgatgtatcagctctgcttcttcccggctcgcgctgcgcttagccgggctacgaattcaccgttgtctgcgggcgggtagcccgggtaaggcgtttacgccgcgacccggggagtgtgccggggctgatgtatcagctcggcctcttcccgggtcgcgctgcgcttagccgggctacgaattcaccgtcgtctgcgagccggtagcccgggtaaggcgtttacgccgcgacccggagagtgtgccggggctgatatatcagctcagcttcttcccggctcgcgctgcgcttagccgggctacgtattcaccgtcgtctgcggggcggtagcccggacaggtgcgcagcaccgcctccgggatttcctgtgctatgattcaaaaaggacaaaaatcacaacagaatgaatcagatgagtaaactcgacacctttattcaacaggccgtcgccgcgatgcccattagcgggacctcgcttattgcttctttatacggcgacgccttgctccagcgcggcggagaggtctggctcggcagcgtggcggcgctgctggaagggctcggattcggcgaacgattcgtgcgtaccgcgctgttccgcctgaataaagaagagtggctcgatgtggtgcgcattggccgccgcagcttctaccgcctcagcgacaaaggcctgcgcctgacccgccgggcggagcataaaatctatcgcgccagcgccccggagtgggacggtacctggctgctgctgctgtcggaagggctggagaagagcactctggcggaagtcaaaaaacagctgctgtggcagggatttggcgcgctggcgccgagtctgctggcttcgccatcgcagaagctggcggacgtgcaatctctgctgcacgaagcgggcgtagcggagaatgttatctgcttcgaagcgcattccccgctggcgctctcccgggcggcgctgcgcgctcgcgttgaagagtgttggcatctcaccgagcagaacgcgatgtatgacgcgtttatctccctgtttcgaccgctgctgccgctgcttcgcgactgcgagcccgcggagctgacgcctgaacgctgctttcaaattcagctcctgctgattcacttctatcgccgggtggtgctgaaagatccgctgctgcccgaagaactgctccccgcgcactgggccggacaaaccgcgcgccagctgtgcatcaatatttatcaacgcgttgcgcccggcgcgctggcgtttgtcggcgagaagggcgaaagctcggtgggggaacttcccgcgccggggccgctctatttccagcgcttcggcgggctgtcgggcgtataaggaggcaccatgcccatttatcagattgacggtatgacgccggttgtaccggacgaaagctatgttcatcccaccgccgtgctgattggcgacgtgatcctcggcaaaggggtctacgtcggccctaacgccagcctgcgcggcgattttggccgtatcgtggtgaaagatggcgctaacatccaggataactgcgtgatgcacggctttcccggccaggacacggtggtggaagaagagggacatatcggccacggcgcgattctgcacggctgcaccatcggccgcaacgcgctggtggggatgagcgcggtgattattgacggggccaggattggggaaaacagcatcgtcggcgcttcggcctttgtgaaagccaacgctgaaatgcccgccaaccatctgattgtcggcagtccggcaaaagccattcgtacattaagtgaacaggagctggcctggaagaagcaggggacgcgggagtatcaggtgctggtggagcgctgcaaacagacgctgcatcaggtggaaccgctcaaagaagcagagccggacagaaagcggctgatctttgacgagaatttgcggccgaaatcatcatcctgaggggaaaatcatggcagagaaattatccgctcagtgccactgcggcgcggtggcgtttaccgttgagcttagcgatggcttcaacaccgttcgccgctgtaactgttcatattgccggatgcgtggggcggttgcggtctccgcgccgctttcaggaatagaggtggtgcgcggacgggataagctcacggagtatcgttttaataccggtcaagccgtgcactttttctgctcggtatgcgggatttacacttttcatcagcggcgttcaaacccgcagcagtacggcgtgaatgtggcctgcattgacggcgtgtcgcccttcgattttccctgcgtggaggtcaacgacggcgtgaatcatccgaaagatggcggcggtggcgtggtggggtatttgcgctacgagaaaaagtgaaactctcctcccgccgggaagcgggaggagtcaactcttatgcggctacaacgctgtcgatagcggctttcgcatcagactgcgctttcgctgcgacttccgggccgtaggcgatgccttcagcaaacacgaagttcacatcggtaatgccgataaagccgaggaaggtggagaggtaaggggtcaccagatcggtcggggtatctttatggatacccccgcggctggtgacgacaaccgcacgtttacctttcaccagaccttccggccctttctcggtgtagcggaaggtcacgccagcgcgcgccaccaggtcgaagtagtttttcagctgggtcgggatgttgaagttgtacatcggcgccgcgataacaatcacatcgttcgcctgcagttcagcgatcagttcgtcagaaagcgccagcgcttcctgctgacgcggcgtcagcggcgcgtcgctcggacgcagagcgccaaccagctcgccgtccagtaccggaattgggtttgcagccaggtcgcgcacggtgataacgtcttccgcgtgcttttcacgccattgttcaacaaaatagtcggacagctgaccagattgcgagtaccctgccagaatactggatttcagaactaatactttgctcatgggtgtttccttttttaatgtgattgacgggccgatgccctggtgcttgttgacactctattcacaatcatgccacagagaaagcgcaataaatcgaactctgtattcagtttttttgaacaaggcacgaaatgcgcggatgtggtactctaacgcaatacttcaaaagagatttttcccggcagtgcgctgcccgataacgctatgacagaacaacaaaaaataaccttctcatcgctctttgaacggcttgatggcctgatgctgcgcgataagtcgcgcttctcccgtcgcctgcacggcgtgaagaaggttaaaaatcctgatgcccaacaggccattcttcaggagatggcgcaagaaattgaacaggcggcagggagagtcctgctgcgcgaagccgcgcggccggcgatcgcttatccggaaaacctgccggttagccagaaaaaacaggagattctcgaagccgttcgcgatcaccaggtggtgattgtggcgggggaaaccgggtcggggaaaaccacccagctgccaaaaatttgtatggagctggggcgcggcgttaaaggcttaattggccatacgcagccgcgtcgcctggccgcgcgtaccgtcgccaaccgcatcgccgaagagctgcaaacggagccgggcggctgcatcggctataaagttcgctttagcgaccacgtcagcgataacaccatggttaagctgatgaccgacggtattctgctggcggaaatccagcaggaccggctgctgatgcagtatgacaccatcatcatcgatgaagcgcacgaacgcagcctcaatatcgacttcctgctgggttatttgcgggaactgctgccccgtcgcccggatctgaaaattattatcacctcggcgaccatcgatccggaacgcttctcgcgccactttaacaacgcgccgattatcgaagtgtccgggcgcacctacccggtagaagtgcgctatcgacccatcgttgaagacgccgacgacaccgagcgcgatcagctgcaggcgattttcgacgccgttgatgagctcgggcgtgaaagccccggcgatatcctcatttttatgagcggcgagcgcgaaattcgcgataccgccgatgcgctcaataagctgaatctgcgccataccgaagtactgccgctgtatgcgcgactgtccaacagcgaacagaatcgcgtgttccaggcccacagcgggcggcggatcgtgctggccaccaacgtcgcggaaacttcgctgaccgtgccgggcatcaagtacgttatcgatccaggcaccgcgcgtatcagccgctacagcttccggactaaagtacagcgcctgccgattgagccggtttcccaggcgtcggctaaccagcgtaagggccgctgcggccgcgtctccgaagggatctgtattcgtctttattctgaagacgacttcctgtcgcgtccggagtttaccgacccggagattctgcgcaccaacctggcgtcggttattctgcaaatgaccgcgctcgggctcggcgatattgccgcgttcccgttcgttgaagcgccggacaaacgcaatattcaggacggcgtgcgcctgctggaagagctgggagcgattactactgacgaacagcagaccgcctataagctgacgccgatgggccgccagctgagccagctaccggtggacccgcgtctggcgcgcatggtactggaagcgcaaaaacacggctgcgtgcgcgaggcgatgattatcacctcggcgctctctattcaggatccgcgcgagcggccaatggacaagcagcaggcgtccgacgagaaacaccgccgcttccacgacaaagagtccgactttctggcgttcgtcaacctgtggaactacctgggcgagcagcaaaaagcgctctcctcgaaccagttccgccgccagtgtcgggttgattttctcaactacctgcgcgtgcgcgagtggcaggatatctacacccagctgcgtcaggtggtcaaagagctcggcctgccggtcaatagcgagccggcggagtatcgcgaaattcataccgcgctgctgaccggtctgctgtcgcacatcggtatgaaagacgccgacaagcaggagtttaccggcgcgcgcaacgcccgcttctccatcttccccggatcggggctgtttaaaaagccgccgaaatggacgatggtcgccgaactggtggaaaccagccgcctgtgggggcgcatcgccgcgcgcattgagccggagtgggtcgagccggtggcgcagcatctgatcaaacgctcgtacagcgaaccccactgggagcgcgggcagggcgcggtgatggcgacggagaaggtgaccgtttacggcctgccgattgtcgctgcccgcaaggtcaactacagccagattgacccggcgctgtgccgcgaactgtttatccgccacgcgctggtggagggcgactggcagactcgccacgctttcttccgcgaaaacctgaagctgcgcaacgaaattgaagagctggagcataaatcacgccgtcgcgacattctcgtcgatgacgaaacgctgtttgagttctacgaccagcgcatcagccatgacgtcatctccgcgcgccactttgataaatggtggaagcaggccagccgcgagacgccggatctgctcaactttgaaaagagcatgctgattaaggaaggcgcggagcaggtcagcaagctcgactatccgaacttctggcatcagggcaacctcaagctgcgtctgacctatcagttcgagccgggcgccgacgccgacggcgtgacggtgcatattccgctgccgctgctcaaccaggtggaagaggccgggtttgagtggcagatccccggtctgcgccgggagctgattatcgccctgattaaatcgctgccgaagccggtgcgccgcaattttgtcccggcgccaaactacgcggacgcgtttctcggccgcgcgacgccgctggagctgccgctgctggattcccttgagcgcgaactgcggcggatgaccggcgtgactattgaccgcgaggcctggcagtgggatcaggtgcccgatcacctgaaaatcactttccgggtggtggacgacaaaaataagaagctacaggaagggcgctcgctgcaggatctgaaagatgccctgaaaggcaaggtacaggagacgctgtccgcagtcgccgatgacggtatagagcagagcgggctgcatatctggagctttggccgcctgccggagagctacgagcagaagcgcggcaactataaagttaaggcctggccggcgctggtggacgaacgcgacagcgtggccatcaagctgtttgataatccgctggagcagcagcaggagatgtggcgcggcctgcgccgcctgctgctgttgaatatcccatcgccgattaaatatctgcatgagaagctgccgaataaagccaagctggggctctatttcaacccctacggtaaagtgctggatctgatcgatgactgcatcgcctgcggcgtggataagctgattgacgaagcgggcggcccggtatggagcgaagagggctttgccgcgctgcatgaaaaggtgcgcgccgagctgaacgagacggtagtggacattgccaaacaggtcgaacagatcctgaccgcggtctttaacgtcaacaaacgcctgaaagggcgcgtggatatgaccatggcgctggggctgtcggatatcaaatcgcagatgagcgggctggtgtatcgcggtttcgtcaccggtaacggcttccgccgccttggagacacgctgcgctatctgcaggcgattgaaaaacggctggagaaaatggccatcgatccgcaccgcgaccgcgcgcagatgcttaaagtggagagcatccagcaggcgtggcagcagtggctgaataagctgccgcctcagcgccgtcaggatgacgacgtgcaggagatccgctggatgattgaagagctgcgcgtcagcctgttcgcccagcagctcggcacgccgtatccgatttccgacaagcgggtactgcaggcaatggagcagattacggcctaggccgccgctttccccggtggcgcaggctgccggggaaggtggatagcgtcaggcgttcacccacgcgagggtgaacccatcccagcctttgctgcccacggtttgcagggccgtgaccgtcagtcgcgggtcgctgcccatcatgtcgataaacgctctgacaccctgcacccgctcatccgcgctatccggattcgtcacttcgccatcgcgcaccacgttatcgcccacaatcactgtccccggacgggaatagcgtaacgcccagcgcagatagtggggattattgggcttatccgcatcgataaaaatgagatcgaacggcgggcgctctcccagcgtttcgaggctggccagcgccggaccttccagcaccgcaacgcgatcgtccacgcccgccaggcgcaggttctcgcgggcgacggcggcatggtgcgcgtcggcctccagggtaagtaattcgccatcggcgggcaattctctggccatccagatggtgctgtagccgccgagcgtgccaatctcgaggatgcgtctggcgcccgtcatgcgcaccagcagggccagaaactgcccctgattagcggcaacgtcgatagccggaagcccggcgcgctggttattctccagaacctggctgagtagcggatcggtggggattaacgctgtcacgagataattatctactgccgaccactgttgttgcatgtcagatttcccgtattacatccctgatgaatcagaccagccgcctcccagcgaccggtacaaatcaacttgcgccagcagcaggttgtttttcacctgtaccacgctgagctgggtggaaaacagcgtgcgctgggcgtccagcacgtccagataggaggagtagccgttgcgatagcggttttgcgcgatgcgcagcgtctcctgggccaccttctcctgcgcctgcagctccgccagctgctcgccgtagcggccgatggcatcgagactgtcattcacctctttaaacgcgccgcgtaccgttttctcatagctaaacagcgcctgattgcgctgggccatcgaaacgtccacctgggcattcagcgcctggcggttgagcagcggcgccagaatgctgccgccgaggctccataagcgtagcggattatccagcaggtcgggcagggtgcgatcctgcaggctgccggtggcggtaaggttaatggacggcagcagctgcgcctgcgatgacgccagggtagcgtcggcggccaccagctgacgctgggcctgaacgatatccggtcggcggttgagcagggttgacggcagctgggaaggtagcgatagcggcgacagctgcgcgaacgcgttgcgcttaacggcgtccggattggcgccgagcagaaggctgagcgcattttcctgctgggcgatttggtggcgcagcggcggaatttgcgcgcgcgtggagcgcagttcggagtccgcctgcatcagctccaggcgtgaggtatagcccgtctcaaactggcgcttcgccaggttgaaggcatcttcgcgcgattttaacgtttgctgcgtcacccgcagctgttcatccagcgagagcagggtgatatagccggccgccaccgaagaggcgacggtcagattcgccgctgcggcagccgccttttgcgcctccaggctggcttgcgccgcgctggcggcgctgcggtttgcgccccagagatcaacatcgtagctggcggttagcgcgcctttatacaccgtactgtggacaggcaggccggtagcggccgactgggaccgcgcgcgggtgccggtcaatccggcgtcaagggagggaaacaggctgctatcggcggcgtaagcccgcgcctggtactcgttgacccgttcgcgggctatcagcacgtcgctgttgtagcgcagcgcctggtcaacgtagagattgagcgtactgtcgtggaagttgcgccaccacaccccctcaaccgggctggaggggccgacatccgcccgccaggcggcggggatctgcagcccgggcgcggcccgttgaacgtcggcggactggcagccggccagcgcaagcataacggcgagagcgagcggacggatcattgctgctcctccgcgcgggtatcgatggtgacctgcaccgacatgcccggccgcaggcgctggccgtttttctgcccctcatcaacggcgatgcgtaccggaatgcgctgggcgattttgacaaagttaccggtggcgttatccggcgaaatagcgctgaactccacgccggtcgccggggagatgctctgcaccgtaccggtgaatttctcgctgttcagcgcatccacggtaaaggtcaccggctgtccgacgcgcacctgggccagctgggtctctttcaggttagcgatcagccagtgctgcggcggcaccagcgaggtcaaatgcgtcccggcggtcacgtatgcgccaaggcgaacggagatttgcccaagctgaccgtccgtcggcgcgataatacgggtgttttgcaggtctatctgcgccagctccagcgcggctttcgcattggcgacgtcggcgagcagcgagtcacgattaacgatggttgattgcaaatcctggcgcgacatttccagcgttgctttggcctgctcgatatccgcggtgccctgcgccgcgctggcgcgggcggaatcgcgttcgcgaatcgatagcgagccgtcggcggtcagctcctgaacgcgttttaaatccgcctgggttttcagattctgcgcgcgggcgttttgcagcgccgcttcgttacgggtgatgaccgcttcggcgcttttacgctgctgctgattgttcttcagcgccgcctctttcatcgccagctgagcttccgcctgatggacgcgctgcttatagatgcggtcgtcgatttgaaacagcacgtcgccggcttttacctgattaaaatcctggaccttaacctcggtgatataaccgttgacctgcgggctgataaacgtggtttgcccgcgaacgtaggcgttatcggtaaactggctttctcgggtaaacggcggcagctgccaggcgtagagaataaccagtacgccaacgatgccaatggcggcggcggtaaaaatagagacgatgcgaatattatttcgggtattggcctgctgtttggccgcatcctgctgactcataataactccagagtgaaaatttttatttgcttcccgtcgcgcgcttcagcgcgatacgagcggtaatacgtaatcttattaagcgccagaaaacccataccagcgtggcggctgaaatcgccgccgtcagcagataggtatcattgtaagcgagaatattggcctgcagggtggcggcgttttgcagcagcgtggtggcctgaacgttgagcaacgtgctgtcgccaatctggctttgatacatctgactgtactgctgcaaacgctcggtaatcagcggattgagcgtggtgagctggtcggcgagctggctggagtgaaacttctcccgccaggtctgaaaggtgccgagaatagcggaacccagcaggccgccgatattctggctcatgccgaacagcaccgagaagctcaccaggttgcgctggtcggcaatgacgccgccaatccccgccagcatcgccggggcgaggaaaaaggcgctgccgaagcccagcagaaactggctgaacatcagctgctccggtcgcgtgaggatcgtcgactggctgtcgagcagcgaggcaaccataatcaacgccagcgccgtggcggtgggccagtagaggcgctgcgggttgagcgtcaggcagctggcgacgatgccgcagacgatcccggcgaaaatcgaccatgccaggttggtcatctgttcattctgcaaacccacgtactgcagccagccgataacgccggtattctgctccgccagcacgatgcggatcagcagcataatcagcccgaggcgcagaatactgccgctggagagccatttgatattgagcagcgggttgctgcggttatgctcaaaggcaatcgcggagacaatcagcaccaccgcgcccgccagcgcccagccgatccacggcgcttcaaaccaccagtccagccgtcccagcgacagcaccgcggtgaccagcgccatccccggcgccagcaggaagaaggtgatgaagtctttcttctcaaacacctttttacgatcgcttggcggcagcttgagggcaatcacgcaggccagcgacaccagcgccagccccagctcaaagaagtacagcccgcgccactcgtcgatttgcagcagctcggttgagaacaggcgcgccagcgggatcgccagggatgaaccggtgatgccgatggtcagcgctttgagccgatggcgggcgggccaggcctgtacctgataataaatccccagcgagcttagcgctgcggctaccatgccgtgggcggcgcgcaccatcagcgctgaactgaggtcgttaacgaacaggtggaaaaaggtcaccagcacgtagagaacgagaaaaccctcggtaaaagcgcgcaggccgaactgctggcgaaacttcaccagcagcaggttgatggagacgttggtcatcacgtagaccgccgggagccaggcaatctcggttgaccaggcggcaaaagtaccctgcaacagctgcagattggcggttaccaccgcgttgccgagcgcgcccgtcaggcagaccagcagcccgacgatcccgtaggcaatacgttttggcgtactgtgaatgggggtcgacggcgagccgaggatcgccggtttttcgtgcggggcccagtcgtgaggaacatagggattagcgtgacgacgcggcattattttttctcaacctcgcgcagcagcttctccagtacccgctgcgtctgccgctgctcttcgggggtaatggcggtaaggatctcctcccgcaaatcatcggccaccgttttcacctgctgatacacctcaaggcctttggcggtagcgatcagcagtcgtttacgcttgtcgcgttcggttttcacccgctcgaccagaccgagatcgaccagccggttgagcagcggtacgagggttgcgctttcgacgccgagctcctgggccagctcgctttgcgatagcggcttttcgttacgcgcgatggcggaaacggcgacccagctggcctggctcatgccgaggtccttgagccgacggttgaccgccaggcgccagtggtgggcggtcagatataaaagatgggaaaagttaagctgtcggttatccataggtcagtctgcaatatcgttagagctctaatgatttttgcctgaccagaacgagaattcaagcctgattgataaaaacaggttaacggtatgtgcgtttattgtggaagatgctttgggaggggggaagagagttctgatctcagcccggcattaaccgggctgagaagggggattatcccggataaataccgcgatctttacgcgccatcagaatccgctcacaggccacgatataggcggcggtacgtaaagagcacgctttttccaccgctttttcgtaaacgtgaacgatcgcatcggtcatgatacggtccattttggcgttgatctcttcttcgctccagaagaagctggccatatcctgcacccattcgaagtagctcacggtgacgccgccggcattacaaataacgtccggcaccaccacgatgccgcgctcggccagcacgtcgtccgcttccggataggtcgggccgttagcgccttcaagcaccagtttgcagctgagggtttccgcgcgctcgcgcgtaatctgaccttccagcgccgccgggatcagaatatccatcggcgtcgtccagaacgcttctttgtcaatttcgcgggcgcccgggaagccggcaatttgcttgttctccgcctgccatgcggtcagcgcggccatatcaatgccgccctcgttatacagcgtggcggtgtggtcctgaatcaccacaatacgcgcgccgacgcccgcgaacaggcgggccgcttcgctgcccacgttaccaaaaccctgcagcgcgactttggcaccctcgatttcgataccgctgcggcgagccacttcgcgaccggtgacgaatacgccgcggccggtggctttttcacggcccagcgaaccgccgaggtgaataggcttgccggtgaccacgccggtgatggtggtgccgtggttcatggagtaagtatccatcatccaggccatcactttaccgttggtaccaacgtccggcgccggaatatctttttgcggcccgatgataatgccgatctcgctggtataacgacgggtcaaacgttccagttcaccctctgatagtgagaacgggtcgacgcggataccgcccttggcgccgccgtagggaatattgactgccgcacacttgatggtcatccaggctgaaagcgccatcacttcattcaaatcgacatccggatggtagcgcacgccgcctttacccggtccacgcgagaggttgtgctggacgcggtagccttcgaagtggcggatagtgccatcatccatttgtaccggaatatcaacgatcagcgcgcgtttcggatggcgcagggtttcgatccagtaggcgagatcgccgagatagggcgcaacgcgatcgatttgacgcaggtaggtggtccatggagatgtactactttcagaagcgtaagataacttttccataagagtcctgtttcgcagtgataattattttgttaaccgtggaaaggtacagctataaactctgtaacgagaatgttatcaccaatttaatgggacggtatttggcaaaaatgcagaatatgctgtcgttgcggctggggttcggctttttatgaataaaaaaacggaaaacaaggccatcaatggatgaatatgcacctttgtgcattaaagccgtagttgtgaccctttatctctatttatcagaatcttgaccctcttcaaaaagtgaataaaacgctatgtatatgtgttgactttgttgcttaacaggcgtgggtgttctgttcgcactttattaccctaaagtatgctgtaccgtctaagatggtggccggtaatgtcaggctaagaacgctaaaaggagagaacatgtcagagcattttccatcgctgccggaggcggtactggccgcggcgaaccagctgggggcctggctggcgcaggatgatttaccgcaggatccgcaaatagagctggtggtgctggcaggcaatgcggtgatcccgaccattgatttcgcctgccggctggcggcgcatcacgccgttcctctgctgatcagcggcggtatcggccactccacctcgtttttataccagtcggtgctgaatgacccgcgctatcgcaccattccggtagacgatcgcgccgaggcgcatattctggccgacattgcccatcagttctgggcgattccgcgccaacgaatcgtggtggaagaccgctccaccaactgcggcgagaacgcgcgttttacccggcagatgctggagcacaacggcattgcgcaccgtacgggggtggtggttcaggatccgaccatgcagcggcgaacgatggcgacatttgcccgcgtctggcaagacgacccgcgtgcgccgacgtggtacagcgcgccgggctgttcaccggtgttgtgtaacgggcgtgacggcgtcacgttcagcgggaaagaggcgggtctgtggccggtggggcgctatctggcgctgatcctcggtgaactgccgcggctggcggataacccgcagggctacggcccccagggtaagggatttatcgctcatgtggatattccgccgtacatcgctcaggcgtggcagacgctgcgcgacgaccgcctgctctccgatgcgctaagcgcgcgtcagctggcttagaagatggcgcggcatgccatgatagccagcccgcgtttccccttcgaacgcaggacctattagccggtaactctcatcttgcccgtttgcgttagcgatatcgcaaacgggcatcatctgttattgaattgtgattctttacgccccgggttgctctgtttttatgaaatatctcacaaaaacaagcgctcatgctgtccctttgcctgatggacgataatttttaacatctagttcacctgttaaaaacaataatcctgaggagcagaccatgacagcacccgttcaacaccctatgtatattgacggccagtttgaacccggccgcggtgatgcatggattgatgtgatcaatccggcgacggaagcgctgctttcgcgtattcccgacggcagcgcggaagatgcccggcgcgcgattctggccgctgagcgcgcgcagccgggctgggaagccctgccggcgattgagcgagcggggtggctgcgcaaaatcgctgccggtatccgcgagcgggccgaggagatcgccgcgctgatcgtcgccgagggcggaaaaatacagcagctggccgcggtggaggtctcctttaccgccgattatctggattatatggccgaatgggcgcgccgttatgaaggtgaaattgtacagagcgaccggccgggggaaaatattctggtattcaagcgcgcgctgggcgtgaccaccggcattctgccgtggaattttccgttcttcctgattgcccgcaagctggcgccggcgctcattaccggtaataccatcgtgattaaaccgagtgaatttacgccgaataacgccatcgcttttgcgcaaatcgtccatgatatcggcctgccgaaaggggtctttaacctggtgctggggcgcggcgaaaccgtgggccaggagctggcgagcaatccgaaagtggcgatggtcagcatgaccggcagcgtcgccgcgggcgagaagattatggccgcggcggcgaaaaacatcaccaaagtgtgtctggagctgggcggtaaagcgcccgctatcgtgatggacgatgcggatcttgagctggcggttaaggcagtggtggattctcgcgtcattaatagcgggcaggtgtgtaactgcgttgagcgcgtctatgtgcaaaagggcatttacgatcgcttcgttaaccgtctgggtgaagcgctgaaggcggtgcagtttggcgatccggcgtctcgcgacgatatcgcaatgggaccgttgattaacgccgccgcgctggagcgcgtggagcagaaggtggcgaaagcggtggcccagggcgcgcgcgttgtcctgggtgggaaagcggtgacgggtaagggctatttctatccgccgacgctgctgctggacgtgcgccaggagatggatatcgtgcatgaagagacgttcggcccggtgctgccggtggtggcgtttgatacccttgaagaagcgctggcgatggccaacgactgcgattacgggctgacgtcgtcaatctatacccgcgatttgaacgtcgcgatgaaggcgatcaaagggttgaagtttggtgaaacctatattaaccgcgagaatttcgaagcgatgcagggtttccatgccggatggcgtaaatcgggcatcggcggcgccgacgggcgtcatggtctgaatgagtatctgcaaacccaggtggtctatctgcaggcctgagtcagcagagaaccggtgggcttcccggaggcgatgctgcgcatctgtccgggctaacccagcccgcagaccgcctcccgggtcgcggctgacgccttacccgggctacccaaacgcatgccgcacgtacctgtagcccgggcaaggcgcgttgcgccgcccccgggatttatttggcgaacttatccagcacgcggataagctgggtaacgaagccatactcgttatcgtaccaggagacggttttcaccagctggagatcgccaacctcggcaatctccagctgcgtggcgtcataaatggaaccgaaatggctgccaatcacgtccgacgagacgatctcctcttcggtgtaaccgaatgattcgttgttcgtcgccgcgtttttcatcgcctgattgacttcttcagcggagacctttttctccagcaccgacaccagctcagtcaccgacccggttttcgtcggtacgcgctgggcgtggcccttcagcttgccgctaagcgctggaataaccagcccgatggctttcgccgccccggttgtatgcggaatgatattttccgccgccgcgcgggaagcgcgtagatctttgccgcgggggccgtcaaccagcgattgcgtaccggtataggcgtgaatcgtggtcatggtccccaccttaataccaaaggcgtcattcagcactttcgccatcggcgccaggcagttggtggtgcaggaggccacggaaataatcgtatcgtttgcctccagcgtgtcgtcgttaacgttatagacaatggttttcatatcgccagcgggcgcggagataagcacttttttagcgccggcggtcagatgagcttgcgctttttccgcggaggtataaaaacccgtacactcgacgatcagctcggcaccgaccgctttccacggaatatgctgagcctctttttcggcataaacggtaatttttttgccgtcaacgataagcgcatcttcagtaaaatcgacgctccacgggaaaggtccgtagttagaatcatgcttaagcaggtaggccagtaccttaggggaggtgaggtcgttgatggcgacgacctctaaaggactattaacctccagtaatcggcgcagtactaaacgtccaatacgcccaaatccattaatcccgagtttactcatgaagaatctccaggtcagttgaactgtcaggtgaaaacttctccaggcttagttcagctggcgggatagggcaaccaacgatttttccggcgccgttaaatgctgataaaaacgcgtacggaaaagtgaataaattcggcgggttgtgggcggggcgttaagggttaataattttttgtttcagctttatacgccgcgggtatattggcaaggggttgaaaaggtgggcccgggaagggcccgccgggtggccgattattcggcgttcccgccccgttcagcaaaagcggcaagcgcggcgccgtcaaggcgatagcgaacccactcactttgcgcaacggcgccaatgctcagataaaaatcaatggccggctggttccagtcgagcacgctccactccaggcgaccgcactctctttttaccgccagctgagcgatggttcgcaatagcgcttttccagcgccgcggccgcgaaattcgggagtgacgtacagatcttccatatagatgccgttgcgaccgagccaggtggaatagctggtgaagaacaccgcgtacccggcaaccttattgtcaatctcgcagattagcgcttccgttttgctgtcgctggcgaaaagcgatgcctggatttcatctaccgtggtgaccacctgctccggcgctttttcataaaccgcaagctcgtaaatcatgtcataaattgcttttacgtccgccgggcgggcctgacgaatggtcatattcattggagtacctgttgtgccatcgtgagtttgataccgccaagcataaacgttaaggttagaagaattaagtgcaatgaaatcacccaatgatgaatattatgcatcctgcgcttcgccgtcttgatttgaatctgctgccggtatttgaggcggtctaccgctatcgttcggtccgcctggcggcggaagagctggcgatgagcacatcggcgttaagccacgcgctatccagactgcgcgccgcgctcaatgacccgcttttctatcgcgaaggtcatcgtatgtgccccagcgtatacgccacccagctcgcgccttccatcgcttcggcgctcaagtttttagatcaggagcttactccgcagccgaagtttgtggcctcggccagtaccgactgcctacagatagcgatcacggacttcaccgcgcagtgcgttttcccgacgctgatgcccaggctacagcagcaggcgccaggcctgcgtttcgaactgcgctatctgccgcacagcccggcgctgacggaactgctggccggcgaggtggatttagcgctgggatttagcgcgctggatgaagcagagcatccggagctggatgagatttgctggctgaaagatgattatgttgcgataagcagcgccaggcgatcccggctcacgctggcggactacctggcagcacggcatctggtagtcaccccgtggaatgaaagccagggcgttctcgacgtgcagcttgcgaaaatgggcttctcgcggcatatcaccatcaaaaccccctctatgctgagcgcgccagctattattgcgcaaagtgaactgcttatggcgataccgcgctctgccgcggcaaaaatgactgacgcggcgacgctgaaggtctttgaattaccgtttgaggttccgccgtttgaagtgaaaatctattcccacaagcggagcgggcagcgcggcgcgagccagtggctgaaagagaggctgagggagtgggccgcgacggaacgaacctgatgtctcgtttgacgagtcagcgatatatgcttaactcatgagacaacaaatgtgaatcgtctgttaacagcctgatgtgcgcttcagtggtaagcgcagcgtcatctatcctgataacgtaagagagaaaaattgaaattagccggactccatcccgatgaactgcgtcgcctgcaatcgctgcgggcatccggattacttaatagcggaaaagaagagcgtttcgatcgcctgacccggcttgcgcgtacgctctacgatctgccggtggcgtcggttagcctcgtgggagaaaataccctgcatgttaaatcctgcgccggacttgaagtcgataccctgccgagggatatcacgttctgcgcgcatactatcctgcagaccgaccctttaatcgttaatgacctgcagcaggatctgcgctttcacgataacccgctggtcacggaagcgccttttatccgcttttatgccggatacccggtacagctgcctgacggcgcgacggtcggcgcgttctgcctgatggaccacaagccgcgcgccttttccgtgcatgagatacaaatattaagcgacctggccgccatcgttgaagatgaattcaaggtgctcgacgcggcgaccgccgatgagctgacggggctgttcaaccgccggggttttatgtcgttagcggagtacgcgctgctgacggccaggcggcgcaatgaaccggcgagcctcgtatttatcgatctcgatcgctttaagctgattaacgatacctggggtcatgaacagggggataaagccctgacggcgatggctgatttgatgaaagccaccttccgggagtcggatatcattgccaggcagggcggagatgagtttattatcctgcttgctaatactgcccagcaggcggcgggcatcgcgatggcgcagctaagcaataacgttgctgagtataatcaacaggcgggcaacccgtggcagctggccttttcctggggctgcgttgaatacgaccctgcaacgcatcatagcctcaatgagatcgttgcggtggcggaccggcgcatgtatcaggcgaagaccagccatggcgccgagcgccggtagggaaccgcccggcgtcgccagccgatattcggcgtctggctgatgccgcggcggcttgcgcttccttagtggagaccaaggcggatcagttcaacgggctcgaacttaccttccgtcccttccacttcgactgtcttattacggcgcagctgggctggcgttaagcccgtcgcgtggatagcgataattttaccggttttacccgtcccgttaatcatcacctggctgccgtttgtaataggattgcggttacgatcgtaagtgatcatgctgatttctccttttaatcatcgggtggtaacaatcgcttctcgcgccgggctgccccggcgcggacgtaataccaatacgcctctcggcccgtcattttgttgtttttgatcaacttcacactttttagcgtccctcaacgggctaacgagccggagacaggctttgcctgacccggaatccgtactgcttttgaagacgattccgcgggtatcaacccccgtggaggcccgggttgcagtcgctgatgcggctgctaaacttttttcgggcataacggagcggaacgatgaagaacaaagaagagcaaacggggctgattggtcttgccattggcgcggcggttattggcctggtctctggccagaagccaatcaaccgggaaagcattgttgaagaactggtgaggctgggcagacagaagggggatggcgtcgaggacgagatttttatgcaggcggcaacgctggtgcgcaagggggtatgatcccgccggtagaagaagcccgggtaggcgaaaacccgggattaaacggggaggaaggtcatcataagatacgctatcacaatgcatatcagcgccatgtaccagacaaaactcattctgttacccgccctgtagcgccatgccggtcaccgcgttaaccacggtcgcggccatcaaaacgccgccgacgatagcgcaggcacggtttttccgggtcgcccccaacgtcaacatcaccaccgctgcggcaaagagggggatggctattatgctgaaagtgttcatcgtttcctcaacactcgtccgttaatcttcctgcatccacatatcggcttcttcgaacatctcctgcacggcgcggctgatctgctccttctcgtgcttgctggcgtcagtattgatggaagccagggtcatcatcggcttaacgcggacgtcggcatcgggaaaaatgcgatgcactcgcttcgtcagttcattaagaatgatctctttagcgccggccaatccctcgaaatttcttttgtcataaatcagctctacgaacattttttatcccgttgatgataatagcagggagtattgtactgtgattatatacagcgtcaaggccgaggtatacgttccccgtattcctgcgccggggataactcgccgcttttgcattaaatgcgtgaaaccgacaattgttttttataagtacgtaaaagttaatgaatttttaataaaaggtgtttatgtcggcgatatcaccgttttattaagggtttctcatgcgcgataaatattctggcctgcaaattggcatccactggctggtgtttcttttagtgataggcgcttacgcggcgatggagctgcggggcttttttccccgcagcgcgcgacccgtcatcaatatgattcacgtctcctgcgggatttctatttttgttctgatggtggtgcgcctgttggtgcgtctcaaatccccggcgccgccaattgtgcctaagccgtcgccgatgatgaccggcttcgcgcatctggggcatctggttatctatctgctgtttatcgcgctgccggccatcggcatggtcatgatgtactaccgcggtaacccgtggttcgcgtttggcctgaccatgccgcacgcggtggaaagcaactttgagctggtggataccctgaaagcgtggcacgagctgctggccaataccggctactttatcattggcctgcacgcgctggcggcgctgttgcaccactacttgtggaaagataacacgctgctgaggatgatgccgcgcaggcgctaaacctcgataaacccgcttcggcgggtttttttgtctctctttactttaattgtgataaaaatgttatcaacaataaaaaagaaggggaagggtatgaaagtcagacatgccatcgcagaagaggctccggccctttgggaggttcgtaatcaggcgattcgccacggttgccgggaaagttatgctgcggaagtcctgcaggcctggacacccgacaacatgcctgaaggttaccgccatgcggtgcgcgataatccgttttttgttgttgatgatgggctgggcaagccagttgccagcggctatctggatatcaaagcgggtagcgttgaagccatatttactttgccgacgtgggagggtaaaggctgcgccagcatgattatggcggccatcatcggagaggcgaaacaacgcaagttcaggcacattaccctcgatgcaacgccaaacgcggccggtttttatctgcgcctgggattcacttcaatcggcgaaaagcgctggcattcgaaaatggcgaacgccgacttacgctgtgaatcgatgatccttagcctcgactaagcgcaaattctcgccgctatgctacggttaaagcggcgaagccatttgcctcatggcaacaataaatatagtatacccccctatatgatatggagggcgtcaccatgccacattcacctgaagataaaaagcgtgccctcagtcgggtaaggcgcatccgtggccaggttgaagcgctcgagcgggcgctggaatccggcgaaccctgtatgaccattctgcaacaaatcgcctcaattcgcggcgccgccaacggcctgatgggagagatggttgaaattcatctgcaggatgaactggtcagcggcgaaacgacgccagaccagcgcgccgccagaatggcggaagtcgggcatctgctacggtcctatttaaaataaaatcaccacgaggaagagagatatgaaatcacgtgcagccgtcgcgtttggcccaggccagccgctttcaatcgttgagattgacgtcgcgccgccgaaaaaaggcgaagtgctggtcaaaatcacccataccggcgtatgccacaccgatgcctttaccctctcaggcgacgatccggaaggcgttttcccggcggtactgggccatgaaggcggcgggattgtcgtcgaagtgggggaaggcgtgaccagcctgcagccgggcgaccacgttattcctctgtataccgccgaatgccgcgagtgtaagttctgtaaatccggcaaaactaacctctgccaggcggtgcgcgccactcagggtaaaggcctgatgccggacggcaccacccgtttctcctacaacggtgaaccgatttatcactatatggggaccagcaccttcagcgaatacaccgtagtggccgaaatttcgctggcaaaagtgaacccgcaggcgccgctggataaagtctgcctgctgggctgcggcgtcactaccggtatcggcgcggtgcacaatacggcgaaagtaaaagagggcgataccgtcgccgtcttcggcctcggcgggatcggcctggcggtgatccagggcgcggtacaggcgaaagccgggcgcattctggcggtggataccaacccggaaaaattcactctcgcgaaagagatgggcgcgaccgactttatcaacccgaatgattacgataagccggttcaggatgtgattgttgaactcaccgacggcggcgtcgactttagcttcgagtgtatcggtaacgtcaacgtgatgcgcgcggcgctggagtgctgccacaaaggctggggcgaaagcgtcatcatcggcgttgccggcgcgggccaggagattaaaacccgcccattccagctggtcaccgggcgcgtctggcgcggctccgcgttcggcggcgtgaaagggcgtacccagctgccgggaatggttgaagaggcgatggcggggaaaattcgcctcgatccgtttattacccaccgtatgccgctggatcaaatcaacgaagcgtttgatctgatgcatgaaggtaaatccattcgtaccgtcattcatttcggcgagaattgattttcctggtgaaaaataacccgggcatgcccgggttatcatttaagagggattactcccgccgcaggttttcataaccattctgccatcgccgctgttctcgccgctcccgttcacgctgaatatccgatttctcatcttcccacaccgcgcagtgcggcccgctgaacacctcgcagggctgtgggttggcggtgagcggagacgccgctttctcttcccaaatcgtcggatcgcgcaggtccacttccggggcttttaacgcctgagccgaggcggcggctaacataaaggtgcctgcgagcaggcggcagggtgaacttttcatccattatccttgttcagttgttattattgataaccattcgcaatagtaacatagctgaatgaaaatggcttgcttaggggggctgaagatgattttgccttcgcgccagccgccaccgggcggttcccgggccgcaaaaagggccccgtttggggccctggcggttacttctgctgcggaagcgcgtaggcgataatataatcgccgcggtccggcgactggcgagcgccgcccgcgttgatgatgatgtactgcttgccggttttcggcgatacgtaggtcatcgggccggactgactgccgaccggcagacgcgatttccagatctctttcccgttggcggtatcaaacgcgcgcaggtagaagtcctgggtgcccgcgaagaacagcaggccggactgggttgataacgaggcgcccagcgtcggcataccgatagggattggcatatgcatgcggatccccagcgggccggtgtcctcaacggtgcccaccggaacctgccacaccagtttgccggttttcaaatcaaccgctgacatagtgccgaacggtggtttctggcacggaatgcccagcggcgacaggaaacgttcgcgcatggcgccgaacggcgtgccctccatcggcacaatccccatttcgataccgctggcgtccttcgccactttggcgcgcggcaccatatagttggcgaggccaaggcgcatatcattgacgaacatcaggctgttgttcgggtcaaccgacacgctgccccagttcatcccgcccagcgagccgggatactgcagcgaacgatcctcgcccggcggggtgaagacgccctggtgacgcatctctttaaactggatgcggcacagcagcaggtcgacaggcgtcgcgccccacatatccgactcggtcagcgtctcgttgccgatcattggcatgccgacggagtagggctgggtcggcgagtagcgctcgcccttgacgttgcccgccgggactggacgttcctcaaccttggcgaccggttcaccggtggcgcggttcagcataaagatcatgccctgcttgctggtttgcaccagcaccggcgtggtgccgcctttaccgtcaggcagatcgtacagcagcggctgggaaggcaggtcgaaatcccagagatcgtgatgggtggtctgataatgccagcgtacctggccggtcgtggcgtcaacggccacgatggaggaactgtatttatcgtccagcgcggtacgttcgccgccaaagaagtccggcgttgcgttaccggtcggcagataaatcagattcagcttcgcgtcataggacatggccgaccagacgttcggcgtaccgcgggtgtaggtctgtccggccggcggttcgccggtcaggttcgggttgcccggatcccatgcccacgccagtttgccggtatgaacatcataggcgcgaacgacgcccgggggctcgccggtggagaagttatccgccacgcgaccgccaaccacgaccacgttacccgccaccagcggcgtggaggtctgctggtagtaacccgctttgatttcccccatgccaacgctcaggtccacaataccgtggtcgccgaaggcgtcgcacagtttaccgttatcggcatcaatagcgatcagacgggcgtcggtggttggcaggaacaggcggcgggagcaggcggccggctgcgcgtcggcggcaggggaagcctgggcctggctctcttcgtaatagcctaagccgcggcagcgctgccagttcggcgcggtggcttttgaatcatagcgccatttctctttaccgctatcgacatccagcgccagcaccttgctgtagggcgtacagacgtaaagcgtatcgccaatttgcagcggcgtattctggtcttccgcgccggagccgttgctctgcgggatatccccggtgtgggcgacccaggcaacctgcagctggtcaacgttctgtttgttaatctggtcgagggcggcgaaacggtcgccgtgggtggtgttgccccagtgcgcccagtttttctgctgctcgcccgcggcgaccggtttaaccggcaccgcctcgctggcgctgaccagcggctgggatttaaacatccagccgaaactgaccaacagtaccaccgccagcaccgctgccaggccaaacgccggcccttttttcgccggctcccgggacagaaacggccagaccagcgcggcaaggaaggccagtacgccgagcgcgaacaggcgcgagaacagcggccagtaggtccagccggcatcgctaatggcccagacgatcgaggcgataaacgctatcgcgtacagtatgataccgccgcgacggctgcggaaaatgagcaccgcggcgataaccatcaccaggcccataatcgcaaaatagaaggtcccgccaacggaggcgagctttgcaccaagaataccgatagccaggccgatgatcagcatcagcccggcgagaagccactgcaggacccgggggaatcctcgcggcgcgttgccagttgccattttttctccttaaccacccctgaacaggcgtgaaccagatgaatcaatttctcaagtgaaggcttttgaatgaagcgatgttgaccttcataaaagcaggttttttactattattgatttcgagtgaaccatttggtgaaatcgtggctatgatagatctgttaaagaaatttacgcaattgttaatgaatgatttcgcactaattgattattgtggtgaatatggtaggtgcgaaaaggaaatcaggcggtcagatctccccgacgcgggtaactgtcggggagagggcgatcagacgggcatcgatttacgaatggcgctcagcagggtttgtgttcccgcggtgagcgtggcgtccactcgggtgagaatacctatcggttcgcccgcgccctgggtgggcaccggcagcgcggccagcagcccacggcgcaggtcgtctttgaccgcaccggaggggacaaaccagacgtagtcgtaatcgacggtgagctggcgcgacagggaagccgacagcgtctcgatgcagccagacggaattttgcagccctggctttgcagcagggtttcggcgttctgtcgcggcagcgtacctttgggcgaaaccaccaccggccactccatgacccgactcagcgtaaccgtttcctgcagcagcggatgccccggacgaaccaccagcttcagggattcgagaaacagcagttcatagttcaacccgctcatcaactccggatcggacatccgtccgataccgatatcgatttctcccgatttgagtccggccagcagcatggtgttattcatggtcgccacctgcagggtgatatctttttgctgctgatggaactggccgatcaccgagggcaggatccccagcgcggcggtggggagcgccccgatgcgcacgatatcgctgttgaggccttctttacggtttagcgcctgtcccgcggtattgagcgcgtcgagcactttaaccgcgtgggtgagaaactgttcgccgaccagcgtgagctgcgcgccgaggcgtccacgctcaaacagccgggtaccggtcagctgctccagttcgtttagcgttttagataaagccggttgactcagatttaaggtttcagccgcacgcccaagagttccctgttgagcgacggccacgaaagtatgtagatggcgcaagcgaatgcgctgactgaaaagaccatttttttgcataatcaatgttaaaaacagaggcgtcccagtgacaagtaagggcgattaaaattgttaacttcatagcaaaatattattaacattttatattattattttacaagttgattttattgagtttgccatatagcgtcgcccctgaccggcaggggcggaaaaaggaagaaaaaactcagatatcgaagaagacggtttcgttttcgccctgcaggtgaatatcgaagcgatatacgatctccgcgccgcggacctcgcgctgcgcgatgagggtctggcgacgcacttcccactcaatcagattcagcaccgggtcgacctggttggcatcctgctcgtcggaaaagtacatccgcgtgttgaggccaatattaatcccgcgggcgaccacccacagattaacgtgcggcgccatggtgcgcccatcgcgacctaccacggccccgggtttaatggtttcgaagcgccagacgccgctggtgaagtccgagcagctgcgtccccagccgcgaaacgccgcatccagcttcttgccctgctgtcggtcgtcgggatggttatagcgcccggcggcgttggcctgccagatttccagcagcacatcgcgcaccggcgtgccggagccgtcgatgactctgccttcgatagtaatgcgttcgccctcggtgtctgccgttgtcagcgtcgggccaaaatttttctcaaagatatggaaaccggcggcgtccggcgcgaggccgatatgcacataagggccggcggtttgtgacgcggtttcaggtaaataatctttcatcgggcggccccctgcgtgcggttttcaaacagcgttgcgcgatggccgcgcaatacgagatcaaaacggtaagccagagagtccagcggtacggctgcatgggtatccagctcggcgattaatgtcctgatggcatcatcgttattgatggttttgacaataggacactgtttaatcagcggatcgccttcgaaatacatctgcgtgatcagacgctgtgcccaggcgtcgccggagagcgaaaagtgaatatgcgccggacgccagtcgcttacctggttgcgccacggataggggccgggcttgatggtgcggaaacaatagtagccgttttcgtctgtcagcacccgtccgcagccgccaaagttcgggtcgataggcgccaggtattgatctttcttatgccggtagcgtccgcccgcgttggcctgccagacttcgaccagcgtatttttcattggtcggccaaatccatcgcgaacgtagccgtggacgattatcctttcgccaatcggcaggccgtctttggcgtagttgaggatcaggtcgttatcgagcgcgccgagatcgtcgctgctgaacaccggtccggtgatttcagaaagggaattctgcagggaaatgagcgcattgcgcggcgagcgcagcacgctggttttatagcccggggcgtaagcgggaggatggctgctgtagtcgcggtgcaggacctcgcgcggtgaccatttgtcgttcatgagggtactccatattatcggtagagaggcatgttgttgtaatgtcgccactcgcagtgtgtgtaaatgttttgttaatttaaagtgaaattaaagggtgtttaacataaccggcggttatgaagtgagcggttgaaaataaaccggccagctaccggcatcacagtttgtaaattcttcccgccgtctgcagagagctttcctacactccagggagaattcactggaggtaagacatcatggcgaacaccatcacggctgatgagattcgggaaagcttttcgcaggcgatgtcggcgatgtaccagcaggaagttccgcagtacgggacgctactggagctggtggccgacgttaacctggccatactggagaataacccgacgctgcacgaacaactggccaacgccgatgaactggcgcggctgaacgttgaacgccacggcgcgatccgcgtcggtacggcggaggaactggcgaccttgcgtcgcatgtttgccattatgggaatgtatcccgtcagctattacgatctgtcgcaggccggcgtaccggttcactccaccgcgtttcgccccattgatgacgccgcgctggcgcgcaatccgtttcgcgtttttacctcgcttctgcgacttgaacttatcgccaatgaagctttgcgtcagcgggcggcggatatcctttcccgacgcgatatcttcacgccgcgctgtcgtgaactgatcgcgttacatgaacagaaaggggagtttaccgccgcagaggcccgcgagtttgtgcaacaggcgctggaaacctttcgctggcatcgacacgccaccgtcgatgaggaaacctatcacgcgctgcatgaagagcaccggctgattgccgatgtggtctgtttccccggctgccacattaatcatctgacgccgcgcaccctggatattgaccgggtacaggcgttaatgcccgagtgcggtatcgcgccaaaagcgttgatagaagggccgccgcgccgcgatgtgcccattttactgcgccagaccagctttaaggcccttgaggagccggtgatgtttgccggagagcatagaggcacgcatacggctcgctttggcgaaatcgagcagcgcggcatcgccttaacgccgaagggccgcgccctgtacgaccgactgcttggcgaggcgggggtgggcaaagataatctcacccatcagcgtcatctgcaggaggtgtttagcccattcccggacagcgaattcctgctgcgtcagcaggggctggcgtactttcgctatcgcctgacgcccgccggcgaagcgcaccgtcaggcgtttcgtccgggcgacgatccgcagccgctgattgaacgcggctgggtcatcgcacaaccgattatctatgaagactttttgccggtcagcgccgccgggatttttcagtctaacctgggcaacgagatacagacccgcagccacggcaacgccagccgccaggcctttgaggaggcgctgggctgtccggtctatgatgagtttgccctttatcaacaggcggaggagcgcagtaaacgacgttgcggtctgctgtaaaatcagtactctgctggcatgagttgttaaaggaagcaggccatgcagaatccgtctaccccgctggtgaaaacccggcagggcaccctatccggcaccgctgaagagaacatgcatatctggcgcggtataccctatgccgcgccgcccgtcggcgatctccgctggcgcgcgccgcagcctgccgcccgctggcagggcgtgcgccgggcggagagtttctcagcctccagctggcaggatattgagtactgtcgtgagctcggcggcggcgatcccggccgcttttccgaggattgcctgtaccttaacgtctggtcgcccgcttcgcgcgcgcagccgctgccggtgatggtctggctgcacggcggcggctataccatcggcgcgggaagcttaccgccctatgacggtaaagccttagcgtcccgtgacgtggtggtggtgacggttaactaccggctggggcatctgggcttttttgcccatccggcgctggaggaagaagagggggagcgcatctataatttcgcgctgctcgatcagatcgccgccctgcagtgggttcaggagaacatacacgccttcggcggcgatgcggccaacgtgacgctgttcggcgagtccgccggggcgcgcagcgtgctgtcgctcatggtttcgccaaaatccagagggctgttccataaggcgattattcagagcggctataccttgccggatctgccgcgggaaaaggcgctggccaaagggcagctcatcgcggagcacttctctttaccgcaggccagcgccgaacagctgcgggcgattccggcggacgcgttctggtcgctgaccgcaccgcttaccatcggcccggcgcccattgttggcgatgccgtactgccgcagccgatgctggagactttttttagcgggcgtcagcacccgctgccggtgatgattggctcgaacagcgatgaggccagcgtcatggcggtgtttggcgtcgatatcgccgggcagatccagaagcttcgccgcgaacgccgttttggtctcggtttgattaagctgctctatcccggcgtcaagggcgatgaggcattagggcgtgaagtctgccgcgatatggcctttaccaccctgggttacgtggtgatgcaggcgcagcagcgggtagggcaaccgtgctggcgctactggtttgactacgttgccgaggcggaacaccaaacctatccgcacggcgcgtggcacggtaatgaagtggcgtacgtttttgacaatctggaccttgccgagccggtgcgacagtatgcgaacgatcgcgaccggacctttgccgcccgggttgccgactattgggctagctttgcccgtgtagcgggtaacggctgccacgagctctccgggccggtgcgctggcccgccagcgtgcgcggacgggaccgtctgttgcgcatcggtttgcacaagcgggccggttttaaagtggaaaaccgctttatgcgcgcgcgtctggcgctgtttcggcgggtgatgaagcaccatgtgacgctggattaacgctgtccggaagatctccgtctgccgcgggacgtttttaaccttctgcagcaaaaataatcgcctgcgcggccaacgttcgtctggccgcttcctgttttgctttgccgccgcggtatttagcatgaaacgccgccggttggtgaaatcatcgccgccccccggatatcggtaattcggtctggtccggtggacatatttttttcacgcatttctgccgtcaacaattggattatcaatcatttttgtctagagtgagcgacattcacgacgcatgggtttgttacgtcgcgtctcaattcacatatgaagaaggatgctctctcaggcatgaaccgcagacgttttctcaaatcttccatggctgttgccgccgtatgcggaacgtcaggagttgcctctctattctcgaaagcggccttcgccgaggactcgggaattgccgacggccagacccgtcgctttgactattccgtacttcagtcgatggcccacgatcttgcgcgtcagccctggggcggcgcgccgcgcgatctgccgccaaccctggcaaacctgaccccgcaggcctacaacagcattcagtatgatgctgcgcactccctgtggagtaatatcgaagagcgcaagctggatattcagttcttccacgtcgggatggggttccgccgccgcgtacggatgttctccctggattcacaaacccagcaggcgcgggaaattcacttccgtcccgagctgtttaaatataatgacgccggcgtcgacaccaaacagctggaaggccagagcgatctcggctttgccgggttccgcgtgtttaaggcgccggagctggcgcgccgcgatatcgtcgccttcctcggcgcgagctacttccgcgcggtagacagcacttatcaatacggactctccgcccgcggcctggcgatcgatacctttaccgatacgccggaagagttcccggacttcacctctttctggtttgagaccgtgaaaccgggggcaacggtatttaccgtctatgcgctgctcgacagcccaagcgtcaccggcgcctataagttcgtggttaactgtcaggagacgcaggtgattatggatgtggaaaaccacatctacgcgcgtaaagacatcaaacagctgggcatcgcgccgatgaccagtatgttcagctgcggcaataacgaacggcggatgtgcgacactatccatccgcagatccacgactccgaccgcctgtcgatgtggctgggcaacggcgagtgggtgtgccgcccgctgaacaacccgcagaagctgcagttcaacgctttccaggataaaaatccgcgcggttttggcctgctgcagctggatcgcgacttctcccactatcaggacatcatgggctggtataacaaacgcccgagcctgtgggtggagccgcgcaaccagtggggtaaaggggccgtcaacctgatggagatcccgacgaccggtgaaacgctggacaatatcgtttgcttctggcagcccgagaagccggtgaaagccggggatgagctggacttccgctatcgactctactggagcgcgcagccgccggtccgttcgccgctggcgcgggtattggccacgcgtaccggaatgggcggtttcccggaaggctgggcgccgggtgagcactacccggataaatggacccgtcgttttgctatcgattttgtcggcggcgacctgaaggccgcggcgccaagaggcattgagccggtgattaccctgtcgagcggcgaagcgaagcagatagaaattctctacgtggaaccgtttgatggctatcgcatccagtttgactggtacccgacctcggattcgaccgacccggtcgaaatgcgcatgttcctgcgctgccagggggaagcgatcagcgaaacctggctctatcagtacttcccgccagcgccagacaagcgtaactatgttgacgatcgggtaatgaaataattgccctttattccgcccgctaaggtcacttagcgggcgtttgttttttaatcagactattaaatcagagtccattatgactgacgaaaacgcgcctgcgagagaaactatccccgtcaccgagtcgctttctctgcgcgctgtggatgaaagccacgtcgctgagctgcatcagctggtgatcaagaaccagcgctggctccagcaatcgctgagctggcccgctgaagttagtcacgaagacgaaacccgccgccacgtgcagggcaacgtgatgctgcaccagcgcggttacgccaaaatgtttttgctctttctgcgagaagagatcgtcggcgtgctgtcgtttaaccagattgagccgatcaataagaccgcatacatcggctactggattgatgaaagccaccaggggcaggggctgctttctcaggcgctgcaggcgctgatggacgcttttgcccgcagtgggacggttcgccgcttcgtgattaaatgtcgggtagcaaaccagagaagcaatcaggtcgccctgcgtaacggtttcaccctcgaagggtgcctgaagcaggccgagtatctgaacggttcgtacgatgaccagaatatctacgggcgcattattgattgtgacaccgggcaattcccggctcgcggctgacgccttgcccgggctacgggccgcgctgagatgtagcccgggcaaggcgcgttgagcgccgccccccggggaacagcgcgcaggggcctgaagctgataaaccacgcggtcgggagcaaaggttatagaaagccgacaatgggcgtgcgggtaaaaagttcgtcgccgtttatcactttctcccctctgatagaaatggcgtctcccgcgctggcttcaattcgcgctctgtcgccgatcgtcacctgatgttcaatcaccacatcgccgcaaatgaccgcatggccttcaattaacacgctatcgtccagcagaatcggcccgccgagcaggtgcgcatgcccaccgaccatcacccgatgcttcagcaggcagttgccttcgaccaccgcgtgctccgccacctgcgagctgtagcgtagggtggggatggcgtcttcttcccgtccggcggtaatcctcgcgtgaccataaacgcgcgcgttatcgcagacccagacgtcgttctcttcattaccttccagccgcgcatgatcgaaaatttccgcccggtgctcgacaaaagcgtgttcgacaaacgcatcgccgtaaatttgtgcctggtgaacgacgcgcgatgcgctgaccgttgcccgctgataaatgcgcaggattttatcgttgtcggcagtcagaccttgagcggcaataattaaacagtgggggaggatctgcgcattgtcggccaggtggcagcatccgcgaatctgcgaatgcgaaacggtgacgttgtcacttattcgcgcgcagtggcttgcctgcacgctgtccagtcgcgcgttatcgctgacgatggcgccatggctgataatgcactcgccggttaagcgggcattgccctcgattttcgcaccggcaaacaccgcgctattcgggtcataaatccagcactcgccttcgtggctcagggctgcttcattgtccagccagccgccttcatcgccgcttttcacgtcagcgaaatcgcgtaaggcgacaatttgccgcagattgacgctatgtttatttccgtcggcttcatagtgaaactggcgaaccttctcgctgaggtaatatttgcgcatctgcctttctcattacatatggttaacataaacatagcaaaaaacgccgtagcgtgtttttgaaggttcctttagaatgcaacttaagataaattgaaaatttaaacaaaatgaataaagagcagcgcgtgagccgggtgctgaatctcccggcgggctattttggtatggttctgggcattatcggcatgggcttcgcctggcgctacgccagcacgatctggccggtgagccggacaatcggcgacggtctggttatcgtggccaccctcgtctgggcgctgctggcgctggcgtttatcagccgtgcagtccgtttcccgcacagcgtactgcaggagatgcgccatccggtggccagcagttttgtcagcctgtttccggcgacgaccatgctggtggccatcggctttgttccctggctgcggccgctctcgctggtgttattcgcgattggcgtagtgctgcagctaagctatgcggcctggcagagcgccgggctatggcaggggaagcatcccaatgaggcgaccaccccgggcctctatctgccgacggtggcgaataactttatcagcgccatggcctgcggcgcgctgggctttaccgacgccggactggtgtttcttggcgccggcttattctcctggcttagccttgaaccggtgattctgcagcgcctgcgcagcgacggcgaactgccgatggccatgcgcaccgccctcggcattcagctggcgccggcgctggtggcgtgcagcgcctggctgagcgtgaacggcggcgaggcggataccttcgctaagctgctgttcggctatggtctgctgcagctgctgttcatgctgcgcctgatgccgtggtacctgcgtcagccgtttaacgcctcgttctggagcttctcgttcggcatctccgcgctggcgaccaccggcctgcatctcggtcatcagcatccggacggctttttccatacccttgcgctcccgctgtttctcttcaccaatctgatcgtcgggctgctgctgattcgtaccttcctgctgctgatgcgcggtaaactgctgattcgcgttgagcgcgacacattattaaaaaataaggattaaccatgacgcttcgtgacgaaaattacttcaccgataaatacgggatgacccgcacccactccgaggtgctgcacgccgccaccctgatcgcgccgggcaaggcgctggatctgggctgcggcaacgggcgcaatagcctctacctcgcggccaacgggtttgatgtcaccgcgtgggataaaaatccggccagcatcggcaatcttgagcgcattcgtcaggcggaagggctggagaatctgcggacggcgattaaggaccttaacgccctcagctttgacggcgagtatgactttattctttcgaccgtggtgatgatgttcctcgacgcgaagaccatcccgggtctgattgctaacatgcagcgctgcaccagacccggcggctacaatctgatcgttgcggctatggataccgacgattatccgtgcagcgtcggcttcccgttcgcgtttaaaccgggagagctgcgcaataattatgaaggctggacgttactcaaatataacgaagacgtcggtgaactccaccgcaccgacgccagcgggaaccggattaagctgcgtttcgccacgatgctggcgcgcaaaccggcttaacgcgccgctaacaggcagagctgtaatgcggtctgataagaggcctcaaaggcgcgcagcggcagaaactcaaatttcgagtggaagttgtgcgcgccggtaaagaagttgggcgttaatacgccttttgccgacagggccgcgccgtcggtgccgccgcgcatcggcgtcggtttcggcgtaatgcctaagctttccatcgcttcgaacatcagatcaacggcgcggcggtcttcgccgatggcattgctgatgttgctataggtatcgctgatgtgaaattccacctttccggtcggatactgcgcggcgattttctgcgccacctcgctaatttgctgcttacggcgatgaaaactttcgaggtcgaaatcgcgaatgctggcctgcagcagggtgctgttctgatcgccctggataccgttaaaccaaacgtagccctcgcgtccggcggtatgctccggcgtttgctggcgatcgaaatggctcatgtaatcggtggccatcagcagcgggttcaccagcacgccctttgatgacatggggtgagcggtcacgccggtaaagcgaatctccgccgcggcggcgttaaagttttcatagacgatttcgccgagctcgcagcagtcgatggtccaggcaaaatcgacggcaaagcgcgcgagatccagcgccttcgcgccgcgcaggcccacttcttcatccggcacaaacgcgaccacgatgtcgccgtggcggtgttccgccgtcaggttttccagcaccgtcatcaccaccgtaacggcggacttgttatccgccccgagcacgctggtgccgtcgctgaaaataatctcttcattgggataagcgaggatttccggatgttccgcaacgcgcagccagatatctttatccctgttcaaacagagatcttcaccagtaaaacgcagaatttgtggatgaatatccggcgacaaaccgacgtcaacggtatcgatgtgggtaataaagccaatccgcggcgcgcctgcgacgttgccttttttcaccgccgtgacggtggcgtgctcgtcaatcacaatctcatccagccccagctggcgtagctcatccgcaagggcctgcgccatcgcgtgttgcccggcggtggtaggcagcgtcgtggctcgcgggtcgctttggctggttatcgccaggtagcgaaagaagcgttgggttaattgactggccagggctgatgacatagtgattccttctttattcgagttttcaggtgtttgcaatcaggctttagtgttatgtatgaaagggaaaacaacaagctattcattagctgacaaattaaaaaggaaaacctatgcaacgcagattcacgacgcttgctctggcgttagcggccctgacggccagctcggccattagcgcaaaaacgctggtctactgttcagaaggatcgccggaaaactttaacccgcaactctacacctccgggaccagcgtggacgccagcgcggtgccggtctataaccgactggtcgatttcaaagccggcaccacagaactggtgccgagcctcgccgaaagctgggaagtcagcgaagatgggaaagtttatacttttcatttacgcaaaggcgttaaattccagagtaataaatattttaaacccagccgcgattttaatgccgacgacgttattttttcgtttatgcggcaaaaagatcctcaccatccttatcataatatctccagcggcaattactccaattttgaaagcctcgaatttggccagttaattaccgcgattgataagcctgatgaatatacggtgcgtttcacgctggcccatgccgaagcgccctttgtggccgatcttgcctggtatttcgcttctattttatcggcggaatatgccgatgcgatgctaaaagccggcacgccagagcgcgtggatatggacccgattggtaccggacctttcaaactcgcgcaatatcaaaaagattcccgaattcttttcaccgcgttcccggaatactggcaggggaaggcgcatatcgatcgtctcatttttagtatcacgccggacgcctcggtgcgctacgccaaactggagaaaaacgagtgccaggtgatgccgttccccaatccggccgacctgccgcgaatgaaagagaacaacgcgatcaacctgatgagcaaagcgggccttaacaccggtttcctggcgtttaacacccaaaaagcgccgctggacaacgttaaggtgcgtcaggccttagcgatggcgatcaataaaccggcgatcattgaagcggtgttccacggtaccggtacggcggcgaaaaacctgctgccgccgggcgtatggagcgcggatagccagctgaaggattatgactacgacccgcagaaagccaaagcgctgctggcggaatcgggggttgcggggccaattaccatcgatctgtgggcgatgccggtgcagcgaccctataacccgaacgccaaacgcatggccgaaatgatccaggccgactgggcgaaaattggcgtgcaaacgaaaatcacaacctatgagtggggtgaatacttaaagcgggtgaaggatggcgaacatcaggcggcgctgatgggctggacgaccgcgaccggcgacccggataacttcttcggcccactctttacctgccagtcggcgaacggcgggtcaaactcggcaaaatggtgctatcagccgtttgataaaattatcgccgaggcaaaatcgataaccgatcgccaaaaacgcgaagcgctctatcgccaggcgcagcagatgatgcatgaccagatgccggcagtcatgattgcccactcgacaatatttgaaccggtgcgtaaaaacgtgtcaggctacgaaatagacccctttggcaagcatattttttatcaggttgatatcagataaacagccaatcacggcccgccggcaacggcgggtttattttttccagctacttgacgtagcaccgcttttgccacaaaacttacccctgttatttgctataactcttgccgataaatggtattcacagggattaacctatatgcgtactccgttattttttaaagtcgctgcgcttgctggcctgttagcattggccggttgctcatccaaaatcgctaagccggaacaatattcgggatttttaaaagattactctaacttaaaagaaaccacctcggcgtccggcaaaccggaactgcgctggatttcgccggattacaatccgagcaactatgacaatatcgtctataacccgatcacctattacccggtaccaaaacccaccacccaggtgggcgagaaggcgctcagggatatcctgaattacaccaataaagagatgaaacaggctatttccgagcgtaaaccgctggcaaccaccccgggcaagcgcagcctgatcttccgcggcgccatcaccggcgtggattccagcaaagaagggctgcagttctacgaagtgattccggtggcgatgattatcgccggtacgcaggcggcaacgggccaccgtaccatggacaccaacctgttttttgaaggggagctgattgatgcggcgaccaaaaagccggttatcaaagtggtccgtaagggcgaaggtaaaaacctgtccaacgaaaatacgccgctcaccgtcgagaccctgaagcaggtcattgatgatatggcgattgacgcggtgaaattcgaccccaataaccgttaatcaggcgtatccgttaatcaaggcgctagtggttgatagcgcctttttcatttcccctcgacggtagcgcgagcgtcagcagcgatccgagcgaacccaggccagcctgcgccgcagcagccactgctccgggcgagcgaacattaccagatttccgaccaggatcagcgccagtccggccacggcgctactgtgccagacgtaaccttcataaaaagtcgaaatagtcagcgcgacgagtggaaacagcagggtgctgtatgccgctttacccgcgccgattcgccccaccagcgtaaaataggcgccaaaggcaatcaccgagccaaacacggcgagatacagtagcgcgcccatatagctgagggtccactgcggcgcgaaattatcaccgcgaaccagcgcgatcgcgcccatgaccagggtgccgtaaagcatggcccagctgttggtggtcaacgtctccagaccgcggcgctggtggcggatgctgagcatattgccgagcgaaaatccaaaggtgcccaatgcgctgagggcaatacccagcaggagcgaggcgttcaggccgctggcccataaatcatcccagaatagcgtcacgatccccgccagccccagcgcggcggccagccagaaacggcccggaggctgctggcgatagaagagaaagctattgatcgcgttaaacaacaccgccatggagaagatcaccgactccagcccggtattgatatacgcggcggcggtatagaaacaccagaaattaaagcagaaaacgcagcagccctgtagcaggcaaaagagatggtcgcgcgcggccagcgggcgcaggcggcgggtaaccagcagaatggtcaacatcgcgacgctggcgacggcgaagcgccagaaaatagacaccggcgcggcaaccggcccctgctgcaaaaagatagcaatccaggtggtgccccagataaccacgaccaacccgtagagtaatgcgttcaaaatgtctctcctgtgagtgttgtaccggtcattgtgcggcctgggcgaattcggcgctgtcatcagcttgtcgccgacttgcaaattcttgcgcttatttttcattagcggcgggggaatgctggtatctgccggcgactcttcttagactagcgatctgcggaatctgaactgtgaaggctatggcttacgggactttcgaaacattgcgtcaaaaaaatgccgtgctgcgggggacggtgaacctcaactccggtattcagctggcggcgtggtataacaatcttgataccatcacggtacaaagcgaccaccataccctgagcctctatattgccgatggctacgaaagctaccaaaaaaccccccacggctggaaaaacggcggcgggccggatcgtttttgcctgatgccgaaaggcgatgagagcacctgggatatccgcggcgatctctcttttgtgcatctttactgcaccgatgaacacctgcgccgggtaggcgagcagatttgggaccgcagcccggcctcgttcacgctgcaggagaaaacgttttccagcgatgacaaaatcaccgccgtctaccgccagtttctcctcgacaacgactggcagcagcaggcgaatcagctgacgttgagttcggccagcacgctgctgctcacccacctgattcagcactattcgaacgttcagtggcgtttaccgaccgtgaccggcgggctggcgccgcacgtcttgcgcaatctgctggcatggattgaggagaacctcgaccagccgctcactcttgccgatctggcgcaggaagcggcgttaagcgaataccattttgcgcggatgtttcgccagtcgatgaagatggcgccgcatcagtacgttatgcagcgccggatggttaaagcgcaggcgctgattagccagagtcggctgccgttaaccgatatcgccatggcctgcggttttagcagcgccagccacttcagcaaccgggtgaaaagcgccaccggcctgacgccctcgcagctacgcgcggcgcagcgttgacagcaaaacgtagctgacgccgccgagaaccagcccccaaaacgctgagccgataccggccagcgtcacgccgctggcggtgaccagaaacgttactaccgccgcatcgcgctcactctcatgattcaatgcctgaaacaggctgccgccgatggtaccgagcagcgccagcccggcaagcatctggacccacgctatcggcagcgccgacatcaacgaggtgattgagccgccaaatatccccgccagcagataaaacacgcccgccgccgccgccgcgagccagcgtttttgcgggtccggatgggcttccgggctctggcaaatcgcggccgtaatggcggcgatgcagatcgagtagaccccgaaaggcgacagcagcagcgccaggccgccggtggcgacaataagcgttgaagcggggacccgatagcccgaggcctggagggtggcgaagccgggggcgttttgcgacgccatggtgacgaggaaaaacggtataccgacgctgatcaacagcgctggcgtaaattcaggggcgatccaggaaggggcgacaacgctgaagcttatttgtgacgttgtcacttctccgctcaatccggccaccgcgcttcctgtcagcagggcggcgacaaccgcgaagcggggaagccaggctttgcacagtaaccatacggctaacatactgccgcataacagcagattagcctgcaggctggcgaaagcctgcatgccaaagcgcagcaatatgccggccagcatcgccgccgccagcgaatggggaataatcttcatcagccgggcaaatatgccagtgatgccgcaaagcacgattaaggcattggcaaaaataaagacgccaaccgcctgggagagcgtgaccccctgcaggccgctgaccagcagcgccgcgccgggcgttgaccaggccgtcaggatgggcacctttcgccatacggtgagggccagggtgctgatgcccattcccagacctaaggcggtcatccagccggcgatttgcgcagcatcggcgcctgccgccgccgctgcctgccagataatggcggcagagctggcatagccgaccagcacggcgacgaagccggcgagcagactcggaaaagggagagtgaaagagcgcatgggagtgccttgtgcgttataacggtcggtataatgtagcattgtgcgttatagcgcacaactggcttttcggcaacgccagacccggatagcggagcccgggcgagcgctattcgtcaattccctgtagaatcaggtgaatgtgcgtataattccttcagatattattgggaggttgaatggatattgcgcaacacctgtcggcaacgttaaaaacgctgcgccagcagcgcggctggagcctgtcgcgcctggcggaagagaccggcgtgtcgaaggccatgctgggccagattgaacgcaacgaatccagcccgacggtagcgacgttatggaaaatcgccaccgggcttaacgtgccgttttccgcctttatcgttgccgatgaggccggtgaaccgacggcatttgatccccagcagcaggccatggtggtcacgccgctattcccttgggacccggtgctgcgcttcgatcacttctccatcaccctggccccgggcgcgctgagtgagtcaacgccgcatgagcaaggggttatcgaacatgtggtggtgattagcggcgtgctggatctttgcctgcaggacagctggcaatcgctgcagccaggggaagggcggcgtttcgccggcgatttagcgcacgcctatcgcaatagcggtgggcagactgcccattttcattcgctgatccactacccgaaataaaaaagccgcgagtaaactcgcggccaggcaaatgactgagacaacaaatcacaacgtgacgaggaaaatccggaatacgtgatgactctatcctcaggcactttttctgggaaatatcttttccttcaatgctttgctaaaaactgcaaattccttccgcggcggcgatggaaaatgttttggtctgcgccaggttctgactacaatagccgccatttcgaccccctataatggataacgacgagcgtatgcgcctgcaaaaccatcatcttgaactactgagtcctgcccgcgatgccgggatcgcccgtgaagcgattttacacggcgcggatgcggtctacatcggcgggccgggctttggcgcgcgccacaacgccagcaacagcctgagcgatatcgccggtctggtaccgtttgcccatcgctacggcgcgaaagtgttcgtgaccctgaacaccattcttcatgatgatgagctggaaccggcgcagcgcctgataaccgacctgtatgaaaccggcgtcgacgcgctgattgtccaggatatgggggtcatggagctggatattccgccgattgagctgcacgccagcacccagtgcgatatccgcagcgttgagaaagcgaaatttctctccgacgtcggcttcagccaaatcgtgctcgcccgcgagctgaatcttcagcagatcaaagcgatttacgataacaccgacgcgaccattgagttcttcatccacggcgcgctgtgcgtggcctattccggccagtgcaatatttcccatgctcagaccgggcgcagcgccaaccgcggcgactgctcgcaggcctgccgtctgccctataccctgaaagatgaccagggccgcgtggtggcgtatgaaaagcacctgctgtcgatgaaagacaacgatcagaccgccaacctggccgcgctgatcgatgccggggttcgttccttcaagattgaaggccgctacaaagatatgagctatgtgaagaacatcaccgcgcactatcgccagatgctcgacgccattattgacgatcgcggcgacctggcccgcgcctcggcggggcgtaccgaacacttctttgttccgtcaacggataagaccttccatcgcggcagcaccgactattttgtcaacacgcgcaaaggtgatattggcgcgtttgactcgccaaagtttattggtctgccggtgggggaagtcctgaaagtcggtaaagactttctcgacgttgaggtgagcgaaatgctgaccaacggcgacggcctcaacgtgatgatcaaacgtgaaatcgtcggctttcgcgccaacacggtggaaaaaaccggcgaaaaccgctatcgcgtatggccgaacgagatgcccgcggatttacacaaagtgcgtccgcaccagccgttaaaccgcaacctcgatcataactggcagcaggcgctgctgaaaacctccagcgagcgccgcatcgccgtcgatatcgaactgagcggctggcaggagcagctggtcctgacgatgaccagcgaagagggcgtgagcgtcacccacacgctggacggcgagtttgccgaggcgacccaggcggagaaagcgctggcgaacctgcgcgatggcgtggcgaagctcggccagaccctttactattcgcgcaacgttgagattaacctgcccggcgcgctgttcgtgccaaacagcctgctgaaccagctgcgccgtgaaacagcggaaatgcttgatgatgcgcgtctgaaggccgtggtgcgcggcagccgcaagccggtttcggtgccgccgccggtctatccggaaacgcatctgtcgtttctggctaacgtctacaaccacaaagcgcgcgagttttatcaacgctacggcgtgcagctgatcgacgccgcctatgaagctcatgaagagaagggcgacgtgccggtcatgattaccaagcactgcctgcgctttgccttcaacctgtgtccgaaacaggccaaaggttcgattaaaagctggaaagcgacgccaatgcagctgatccacggcgatgaagtgctgacgctgaaatttgactgccgcccatgcgaaatgcacgtggtcggtaagataaaaaaccatatcctgaaaatgccgctgccgggcagcatcgtggcgtccgtgagtcccgatgagctgatgaaaaccctaccgaaacgcaagggcgcctgataacgaaatcgctactggtagtgatgcatttttggtttccgcgcattctgccagtggtgctgctcgcgcaggtcggaggcggcgtcttccgcctggctgcgcagctcgtcgctatcggcttcgtgctgtaactgctgttcgagactctgtaccgggaagaaatcgtgtccgtgctggcgggccagcacgtgcccggaaaacagggcgcacgccagcagtaatgttgaaatgcttcttctgaacatctctttttccatgctatcggcgaatgaggctactatgccaggggctgggtgagcttattacgtcggttgtcaaagaagagaaaaggctttgtcagcatcgcctgacggatggcgaaaaaaagcccgatggtgtcgccatcgggccgaataacataacgtgacgggcggatcaggccttcagcccggcggccgtcatcagcagccgaaatcccatgcttaccgccgccagcgccagcacgctgcctccccacaggaccatcatccataacgtgcgcttaagccatactcgttgcatcagtgatacccctcgccgtgttgaactttgccgcgaaaaacgtagtagctccagaaggtgtagccgaggatcaccggcagaataagcagcgcgccaaccagcataaagccctggctttgcggcggcgcggcggcctgccagagggtgatgcccggtggaataatatacggccagatactgattcccagcccgctaaagccgagaaagatcagccccagcgtgaggacaaacggcagcaggtggctggtgctgttgcgcagcgctcgccacagccaggcgcttatcgccgcgaccagcagcggtaccggcagcaggaagaagagatttggcaagctaaaccagcgctcggcgatggccgtctgcgccagcggggtccagatgctgatggcgacaattaccgccagcagcgccagcagcaaaccgcgcgcggtcacgcgcatattgcggtggagcgcattctcgctcttcatcaccagccagctggcgcccagcagcgcatacgcaatgcacagtcccaggccgcagaacagggtaaacggcgtaaaccagtcaaacaccccgccgctgaaactgcggccgctgaccgcgaagccgttgatcaccgcgccgacaaccatcccctgggtgaaggtggccagaatcgaaccgcccataaaggcgcgatcccagaacgggcggtgcgatggcgtcgcgttaaagcggaattcaaaagcgacgccgcggaaaataagcccgatcagcatcagggtgagggggatcgccagcgcatcgataattaccgcataggccagtggaaaagcgccaaacagccccgcgccgccgagcaccagccaggtctcgttgccatcccagaccggcgcgacgctgttcaccatgacgtcgcgatccgccgcgtcccgcgtggtactgaataaaatgccaatgcccaggtcgaagccgtccatcacgatatacatcagggtggcgaagacgatgatgacaaaccaaataaccgataaatcgatacccattaccaggactccttctgctgtacatggtccgttgcggcggaaagcgggcgggcaggcgtaccggcgccaggcggctgagcgtcctgcggccctttgcgaatcagacgcagcatatagctataaccgacgccgaataccgaagcgtagacgacgataaacgtcagcagactgatggacatatgcaggtcaccgtgagcggagacggcatctgcggtacgctgtacgccgtagacgacccacggctggcggcccacctcggtggtcacccagcccgcgaggatagcgataagccccgatggccccatccatagcgcaaagcgtaaaaagggtcgggagtgatagaggcgaccgcgatagcgcagccacagggccagcgcgccgagcaggatcatcagcatgccgaggccggccatcagacggaaggaccagaacacgatggtggcgttagggcgatcttccgccgcgaactctttcagcgcgggaacctgtttatccaggctgtgggtgaggatcaggctgccgagggccgggatttccagaccatagcgcgtccgttcctgctgcatatccggccagccgaacagcagcagcggggtgggttctccggggatattctcccagtgaccctcgatagcggcgattttcgccggctggtgcttgagcgtattcagcccgtgcatatcgccaatcatggcctgaaccggggcgacaatcagcgtcatccacagggccatggagaacatcgcgcgaacggcgggcgtgttgtttccgcgcagcaggtgccaggctgccgatgcgccgacgaacagcgcgctgctgagaaaggccgccaccgacatatgcagcaggcggtagggaaacgacgggttaaagataaccgcgaaccagtccaccggcaccacctggccattgacgatctcaaacccctgcggcgtttgcatccagctattggacgcgaggatccagaaagtggagattatcgtccccagcgccaccatgcaggtggcgaagaagtgcaggcccggcccgacgcggttccagccgaacagcatgacgccgaggaatccggcttcaaggaagaaggcggtcagaacttcgtaggtcagcagcgggccggtaatgctcccggcaaactcggagaatccgctccagttggtaccaaactggtaggccatgaccagacctgagaccacccccatgccgaagttgacggcgaagattttcgaccagaagtggtagagcgagcgccaggtcgggtttttggtttttaaccataagccttcgagaaccgccaggtagctggctaacccgatggtgatggcggggaagatgatatgaaatgacacggtgaaggcgaactggatccgcgccaggtggaatgcatcaagaccgaacatgcaaaactccgcaataaaattgattcagcgcaattctaggcctccaccatggcggatagcaggaacagaaaccctgtttttatctataacagttgtcgatttgagcttctgttttttgtgataaatcctatttttctaaaatcaagctatttcacacccgcagatagtatgttattttaatttgacgttagcgctgcaagccagtaattaaacgttcctttgggtaagcgatgtttatattttaaatttaagtataaatatcctgaataattcataagttgtgtatcaatcctataataaaataattgaccgtttttaccgcgcgcacgtacgccttcattaacgctggtttcgtgtgctgtggattttaatctgggattttaactcagcgtgatttgagcgctgagttaaggatatgtttaatacatacccgtaatcttatgggttgttattggatagtgtatttattgattatattttacagaggatgtgattgtgtcgactaatggacttcgtagtttgtgtactgttttgttaattatgacttttttctggatactggttgttagtgggatggttatgctattttaaataatagcttatcgtttaatcacttgagtttattctgcatcaggtggatatatgagcaataaacgaatggcttagctgtaagtaattcgtgctatcgccaatgccaatctttgtaaataggtcagtatataaatactggcctattttataaactgatatacaattgtgctgacattttcttgcggattgttatatgaaaaagtaccagcagctggcgcagcagattaccgaacagattggccttggggtgtggttacccggcgaccggctgccctcactgcgggaacaggtggtcagcagcgggatgagtttcatgaccgtcagtcacgcctaccagctgctggaaagccagggccggatcattgcccgcccgcagtccggctattatgtcgcgccgcagccgatcaaacagcgccagcctgagccgcccgcccaggtgacgcgcgatgagtccgttgatatcaacacctacattttcgaggtgctgcaggccagccgtcaggcgtccatgctgccctttgcctccgcttttcccgatccgcgcctgtttccactgccgcagcttaaccgctctctggcgcaggtcagcaaaaccgccaccgccatgagcgtgattgaaaacctgccgccggggaatgatgaactccgccatgccattgcccgccgctacgcgctgcagggaatgaatatctcgccggatgaaatcgtcatcaccgccggagcgctggaggcgttgaaccttagcctgcaggccgtcactgaaccgggcgattgggtcgttgtggaaaacccctgcttctacggggcgctgcaggcgctggaaaggctgcgcctgaaggcgctgtcggtggcgaccgatgtcaaagagggcattgacctcgacgcgctggagcaggcgttgcagaattacccggttaaagcctgctggctgatgaccaacgggcaaaacccgctcggctttaccctcagcgcggagaaaaaaacgcagctggtcgcgctgctggcgcgctacaaggtgatgctgattgaagatgatgtttacagcgagctctatttcggccgcgagaaaccgctgccggcaaagtactgggatcgcgacgatatgacgctgcactgcagctctttttccaagtgcctggtccccgggttccgtattggctgggtggcggcgggcaggcacgcccgacgcattcagcagctacagctgatgagcacgctctcaaccagttcacccatgcagctggcgctggtggattacctttcgaccaagcgctatgacgcccatttgcggcgtttgcgccgccagcttgccgagcgcaagcagctggcctggcaggcgctgctgcgccatctgcccgcggaggtgaaaatccatcatagcgacagcggctattttctctggctcgagctccccgccgggagcgacgcgggggagctgagcgcccgcgcgctggcgtataatatcagcattgcgccggggaaaatgttctccacctccgccagctggaccgcattttttcgctttaataccgcgtggggctggggcgaaagagaggagcagggggttaagcggctgggcgaactgattcgcgagatgctggcgtagctgggatggcggtccgcttgcccgggcaggggaagtttagtggcgcccgggcaagcgcagaatatccctgaccggtccggccgccacccggcaaaaaaccgcggcggcagagaaaacggttttttcatttatccggtttttttatatccagcggttatccctttccttaaaaatatgccgctgacgcaggctgaatatcatgcccgttattattgttccgcggtaaaccatatgaaatttgcatagtcatattaactcgctaaccgcttgtctataatccgcaaagttagcccgtgtcgcacgttttgtgcgtaatgcgccccttgtcacaacctgaataaatttccccgggaggccatagcgcgccgtctactgttattaagggagatatttttacggcatggctgccgctcattttcttgtgacaggagtaagacccgatgagcaaaaaaattgcccgtggcagcctttgcgtgctgggtatggtatgcctgacggcgcaggccgccgagccgccgacatctctcgataaaggcgaaggccgtctcgatattatcgcctggccgggatatatcgaacggggacagaccgataaaagctacgactgggtaacccagtttgaaaaagaatccggctgtcaggtcaacgtcaaaaccgccgccacgtccgacgagatggtcagcctgatggcgaaaggcggttatgacctggtcaccgcgtccggcgacgcctcgctgcgcctgattatgggcaagcgcgtgcagccgattgacaccgcgctgatcggtaactggaagtccctcgacccgcgcgtggaaaatggcgcgtggttcaacgtcaacggtaaggtttacggcactccctaccagtgggggccgaacctgctaatgtacaacacgaaaaccttcccgacgccgccggacagctggagcgtggtgttcgtcaaacaaaacctgccggacggtaaaaccaaccttggccgcgtgcaggcctatgacgggccgatttatattgccgatgccgcgctgttcgtcaaagccacccagccgcagctgggcatcagtgacccctatcagcttaccgaagcgcaatatcaggcggtactcaaggtgctgcgcgatcagcacgccctgattcatcgctactggcacgataccaccgtacagatgagcgattttaaaaacgaaggcgtcgtggcctccagcgcctggccctatcaggccaacggtctgaaggcggaaggtcagccgattgcgaccgttttcccgaaagagggcgtcaccggctgggcggacaccaccatgctgcatagcgacgcgaaacacccggtttgcgcctataaatggatgaactggtcgctgacgccgaaagtgcagggggatgtcgcggcctggtttggttcgctaccggtggtacccgaggggtgcaaagccagcgcgctgctgggggacaaaggctgcgagaccaatggttacaacgaatttgccaaaatcgcgttctggaaaacgccggtagcggaaggcgggaaatttgttccctatagccgctggacccaggattacattgcgattatgggcggtcgttaagtcgccggaggcgaagaacatgcacgcggtagagttcgataatgtttcgcggctgtacggcgacgtgcgggcggtggacggcgtcagcatcgccattcgcgatggcgaatttttctccatgctggggccctccggctccggcaaaaccacctgcctgcgcctgattgccgggtttgaacagctttcgggcggcgccattcgcatttttggtaaagcggccagcgaactgccgccgtggcagcgcgacgtgaatacggtgttccaggattacgcgctgtttcctcatatgtcggtccttgataacgtcgcctacgggctgatggtcaaaggcgtcggtaagaaagcgcggcatgcccgcgcgctggaggcgctggagaaggtcgcgctcgcgtttgtccacgcgcgcaggccatcgcagctttccggcggccagcgccagcgggtggcgatcgcccgcgcgctggtgaatcagccgcgcgtcctgctgctggatgagccgctcggggcgctggatttaaaactgcgtgaacagatgcagctggagctaaagaaactgcagcaggcgctgggcattacctttatttttgtgacccacgatcagggcgaagccctgtcgatgtccgatcgcgtggcggtgtttaataatgggcgaatcgaacaggttgatgcgccccaggacctctatttgcggcctaaaacggcgtttgtggccggctttgtcggcaccgccaacgtattcagcagcgagcaggcgcacaagctgtgcgcgatggcgggaacgtggtcgctgcgcccggaacatatccggctgaacgttgccggggagatccagacggagggcgttgtgcaggcggtgcagtatcagggggccgcgacccgcgtcgaactcaagctggcgaatggcgagaagctgttggtgagccaggcgaatagtgatggccatgccgcgctaaacgcgccgccggtagggcaaacggtgctggcttcgtggtcgcgagcggcgatggtgccgctggagagcggaggctgatatgacgatggcgattccgtccgccaccaccgggcgcgtatccgcgctgttctggcgtaaaccctcgctggccctgtttttgcttctgcttggcccgctcatgtggtttggcattgtctatctgggatcgttgctgaccctgctatggcaaagcttctacaccttcgacgatttcaccatgtcggtcactcacgacctgacgctggccaatctgcaggcgctgtttaacccggcgaactacgacatcattatccgtaccctgacgatggcgctgtcggtgaccgtcgccagcgcgattctggccttgcctatggcctggtacatggcccgatatacccggggcaagatgaaggcgtttttctacatcgccgtgatgctgccgatgtgggcaagctatatcgtcaaagcctatgcatggacgctgctgttggcgaaagatggcgttgcacagtggttcctgcgccatcttggcctggaaagcgtactgagcatggtgctgacgatcccggcggtcggcggcaatacgctatcgacgtccggactggggcgcttcctggtgttcgtctatatctggctgccgtttatgatcctgccggtgcaggccgcgctggaacgcctgccgccatcattgcttcaggcctccgccgatctgggcgctcgtccgcgccagaccttccgctacgtggtgctgccgctggcgattcccggcattgccgcaggctcgatttttaccttctccctgacgctcggcgattttatcgttccgcagctggtggggccgccggggttctttatcggcaatatggtctattcccagcagggggcgattggcaatatgcccatggcggcggcgtttaccctggtgcccatcgtgctggttgccctttatctggcgtttgtgaaacgtctgggagcgtttgatgcactctgaacgcgcaccgctgctcctgaaagtggcaacctggggaggggtgatctttctccatttcccgctgctgattatcgcgctctatgcgtttaataccgaagacgccgccttcagctttccgccacagggcctgacgctacgctggtttagcgaagcagcggggcgcggggatattatcgattccgtgacgttgtcacttaaaatcgccgcgctctccaccgctatcgctctgctacttggcacgctggctgcaggtgcgctatggcgcagcacgttttttggcaagaacgccgtctcgctactgctgctgttgccgatagcactacccggcattatcaccggactggcgctgctcactgccttcaaggccgtcaatctggaacccggattgctgacgatcgtcgtggggcatgcgacgttctgcgtcgttgtggtgtttaacaacgtcattgcccgctttcgccggacctcctggagcctggtggaggcgtcgatggacttaggcgccacgggctggcaaacctttcgctatgtggtgttgcccaatttgggttcggcgctgctggcgggaggtatgctggcgtttgccctgtcgtttgatgaaattatcgtcaccacgttcaccgccgggcacgagcgcacgctgccgctctggctgctcaatcagctcggacgcccgcgcgatgtcccggtgaccaacgtggttgcgctgctggtgatgctggtgacgatgatgccgattctgggggcctggtggctcacccgtgacggcgacgtcagcgctgaaaacggaaaataaaatatcgatacaggataatgctatgcaaaataaccttttgattaacggtaagttagtggctggagaaggcgagaccgtgccggtgtttaatcccgccaccggtgacgagatcctgtcgattgctgaggccacggcggcgcaggtagacgctgcggttgaggccgcggatcgggcctttgttagctggagtcagaccacgccgaagttccgcgccgaatgtctgttgtcgctggcggacgtgattactgaacatgcgcaggcgctggctgagcttgaatcgctcaactgcggtaagccgctgcactgcgtggtcaacgatgagctaccggcggtcgccgatgtcttccgcttctttgccggcgcggcccgctgtctgccgggcatggcggcgggtgagtatctcgaaggccacacctccatgattcgccgcgacccggttggcgtggtggcctccatcgcgccctggaactacccgctgatgatggcggcatggaagctggccccggcgctggcggcaggcaactgcgtggtgatcaaaccctcggagatcacccctttaacggcactcaaactgggtgagctggcaaaagacgttttcccggccggggtgcttaacgtgctgtttggccgcggcgcaacggtcggcgatccgctgaccgctcacgagaaggtccgcatggtgtcgttgaccggttcgatcgccaccggcgcgcatatcatcggccataccgcatcgtcgattaaacgtacgcatatggaactgggcgggaaagcgccggttatcgtctttgatgacgcggatatcgacgcggtggtggagggcgtacggacctttggattctataacgcaggccaggactgtaccgccgcctgccggatttacgcccaggccggagtttatgaccagctggtggaaaaactcggcgccgcggtcgccagcctgaagatgggcccgccggaagacgaaacgaccgagctggggccgctgagctcgcaggcgcatctggacagagtctgcgccgcagtcgatgccgccagcgcgctaccgcatattcaggtggtcaccggcggcagcaaagcgccaggcaacggttactattatcagccgacgctgctggcgggagcgaagcaggaagatgcgattgtccagcgcgaggtcttcggcccggttgtcagtattacctcatttcatgacgaagagcaggcgctgagctgggccaacgattcgcagtatggtctggcttcgtcggtctggaccagggacgtcggcagggcgcatcgcctgagcgcgcgtctgcagtatggctgcacctgggttaacacccatttcatgctggtgagcgaaatgccgcacggcgggcagaagctttcgggctacggcaaggatatgtcgatgtacggtctggaggattacaccacgatccggcacgtcatgattaagcacggataggacgcgttcgtgataatcgcgaagcggactgattaccctgctaatagttagttatagcaaaaaaagctaaaacggaagcgctgctttatgagaatattctcatgccccttcaagagctaagccatgatgagtgccggagataagcgccggatggggctggtaccccccagggtgcaggatgcacccttaacgggacactgcaacgattgataatgattcgtaagcccctgcatgatatgcaggggctttttgttgtacggtcgctgcgggtttgttactgctagtgcgcctgatatcgtagcgtcatcaatttattacgtatgaggtcatctggtttttcgaaaatgattatcagactaacgttttgtttttttgctcggtaaattcgcctggcgacgttcgcgaacataggaaaaaagattataaattgcagcaatgagtaaaataagcgccacaatgagaagggcgattcctgacatgtaccacctcaaaaataaatgagtaaaaaacaagcttcgcataacttgtgattatgaatgtatgattttgtgctaaataacgcaaatgatatttcttatcatttaaaacctggcggggatgtctggctgtctgctgtcgttgtaatctattgatgtataaataatttctaattatggggtcattctactgcaatcctgtctgccctggaacctgctaataatgatgatcgcataccggcatcgcgtccaggcgagtataaagaacagtaaacaattccccaccggtatgaaaagcgcctttgtttttaactctaccgttaagcgctggcggtcgtgccgggatgatattaaggtccggcattaaccctattaataatcatgttattgaacgcggcagatgaaattattatgcctgcgatcggcaatataaatccggtgatatttattcgcgcgcgataatctttagattctgcgtaattgtaatatttatgttaaatattacgcatatccaggacgttgataagagaaaggacgcaggtttgactttctatagccgctcatgcgaacattcggcgcaatttgttgcttcgaagttgatattgttttgaaaaaaatagcgtgtttcctttttgtggcctgcgccacggcgatgctttacgggaattttccggccaaacagattatgggctgtgaagagcagggcgtcgcggaaccggtctgcatggcggccgcatgggatagtgaaaaagtcgatcttttgccggcctggaatcccgacgtccagaagctgattaccgcgcaaaagaccctgtctgctgcggagccggggtctttcaaatcgtaaaaaagcagccttcatgggctgcttttttaggtttcattgctgagtaaaatcgctaaaaccaaccaaaacgaacggataacaggccgataagcgcaagtgccgcgccgacatttatcagaagaacggttttgctggaaacatccataacgccacctttataaataagcctctacatttatagtacgagctcaaagtttgcgctatcggacaaagacgaatcgggcgtttttctgaaattaaccctgttacctgttttaaaataccataatctctgacgcactctgggggtgcgaaaaggcatcgcgatcggcgaaaatgcttgtcagggaaggaagaagaaaaatgacgttataccagaaaatgctgattttttacggagttatgggcttcatctgcgcggtaatcagctggttcttaacgaaagagagccgctggatccgcctgctggcggcgctgttgattggtgcgacatggccgttcagttttcccatggcgctgctggtctccctgttttgaaggaaaaattgatggctcactcttggttatgactgtataaaaaaacagtcatcactcacggagccttttcgatgcttagtttttactcttcacaggctggcgctatagtgcgctggctcgacctgcccggtcgcggcgaccctgttgtttttatccacggcctgggctgcgcctctacctatgactatccgcgcgttgccgccgacccggcgctggccgggcggcgaatgattcttgtcgatttacccggtttcggctacagcgataaacccgagtccttcggctaccgtattggcgatcaggccggggtggtggttgagctgctggaccgcttagggcttgagcgctgctatctatatggccacagcatggggggcagcgtcgcgattgaagcggccgagcggctcgccggacgggtgcgggcgctgctggtggccgagcctaatctctatcccgggggcggcatgtacagtagacgtatcgccgaacagactgaagaacgctttattgctcgcggctacgccgacatgctgtccgccgacgcttcgccttgggccggctgtctgcaaaacagcgccccctgggcggtgtggcgcggcgcgaccagcctggtgatgggcgttaatccctcctggtttagccgctttatccacttatcctgtcctaaggctctgatatacggtgaagattcgctaccggcccgggaagcgacggatagcgaagccgccgggatcccgctgctggtgataccccaggccgggcactcaatggcgtgggaaaacccatcggcgctggcccgtacgctcgccgatttttactccgccattgaggcagaagcctgattcgtgatcgccgcacataaaagaaactatatttcatttattttgatatatgatttcttttattcatggcgagcgtgaaatgcgaaaaatcactatcctgggtatctcggctttactctttacaccgctgcttctgcaagggtgcgcgacgcaaactccccgcgggacgacctcccgtccacagcttacggcggcagaagcggcaaccttcaccattgagcgctattttgcgcaaggcggcgcgttaaatgaccccgatggcccctggtcgccatcgccggttcacctcccgcaaaccgagagcgcgtggcgcgtggcaccctcgggagcgccgttcacccgcattcagcaggcggttaacgcggcaataggccagcatggggcgcaggaggcgcgcatctatatccgcatcgaaccgggcatctatcgggagacggtctatatccctgaaggcgcgccgccgataaccctctacggcgccggagatagtcctgaagaggtgagaattgagctggcaatagactcgcagttctcggtagcgcgctatcgccagcgggtaaatagccaacagcaataccgcgaaggcgatccggcatggtatcagtatgcgctgtgcgccgggcgaaccagcaagacgataggcaccaactgcgcggcggtggtctggtcgcaaagtgcggattttcagctgctgaatctcagcgtagccaatagcctgctggataccgtcgacggtgggacgcatcagggcgtggcgctgcggacggacggcgatcgcgtgcagctggagaacgtccgcctgctcggacgtcaggacacgctctacgtaaataccagcaatcggcgcaatgaggcggtaaccgaccgtatcagccgggtatacgtgaaagacagctacgtcgaaggggatgtggactacgtctttggccgggcgaacgccgtttttgataacgtccattttcacaccgtctcaacgcgccgctcgcctgaggcatacgtgcttgcgccgaatacgttgccggataatccatacggctttctggtgaagaatagccgctttaccggcgacggcggctatcagggcagcttcaaggcgaagctgggccgcgcctgggatcagggggcggggaagaccggttatttagcgggtaaaaccgctaacgggcaggtgcttattgccaacagtattatcgatcaaagctacgatcggctttccccctgggacgctgcggccaccaccgcccggccgttccgcggcaacacttccgcagaacggcagcttgatgatgttgccttcaatcgcctgtgggaattcaataaccactggcagccctgaggcttaaaacgggagctcgcgcgggaccgtttgcagcgttacccagcgtagctcggtaaactcggcaattcccgcgcgtccgccaaagcggccgtagcctgacgatttgcagccgccaaacggcatttgcgcttcgtcatgtacggtggggccgttgatgtggcaaatgccggtttgcagattttgcgccaggttccacgccctggcgctgtcccggctgtatatcgccgacgagaggccatattcgctttcattggcgacggccagcgcttcagcttcgtccttaacgcgaataatcgatttcaccggaccgaacgactcctcatgccagatgcgcatttcccgggtgacgccatcaagcagggtggcgcgcatttgcgtcgaatcggataggccgccggccagcaggcgcgcccccttcgccagcgcgtcctctatcaaggcattgcagcgggtgacggtcttcatgtccaccaccgggccgagcaggctggcgggcagggcggcggcgcgtctggccagctgcgccacaaacgcttccgcgactgtcgcgtcgacgatgatgcgctcggtggacatgcagatttgtccggcgttggcaaatgcgccaaaaattgcgcctgcggcggcctgttcgagatcggcgtcatccagcaccagcagcggcgctttgccgccgagctccagcaccgcgggtttcagatgttcgccgcaggtgcgggcgattatccgccccaccggcgtggagccggtgaaattgatgcggcgtacggcgggatgggcaatcagtaactccaccagcgcaggcgcgtcggcgggggcgcaggtcagataattgaccacgcccgcgggaaagcctgccgccgccagggcatcgataatcagcccctgcgtcgccggtgaaagctccgcgcctttgaggataaccgtatttccacaggccagcggcgtggcgatagcgcgggtcgcgaggattaatggcgcgttccacggcgccatgccaagcaccacgcctgcgccctggcggatgcccaacgccagatttcccggcacgttggaagggatcacctggccctcaatttgtgtggtcagggcggcggcttcgcgcaggatatcggcggccagatgaacgttaaaaccggcccagtgcgcggtggctcccgtttccgccgccatcgcggcgataaatttcgcctcatggcgcagcatctcttccgcggcctccagcaggagacgtcggcgctcggcgggtaccgtatcgcgccactgcgggaacgccgcgccggcggcagcggcgcagcggcgggcgtccgccaggctggcggcgctgcaacggaggcgcgttcgtgcgtgagcggattatcgcgggtaaaggtggcatgaccttcagcatcatgccactggccgttggtgtacagattgcaggttattgtcattattggcttctcctggcgttacgatttgccgagtgtaccgggttgcgccgccgcgcgctggcggtcgggcggttatcgcccgcttttttcgtaactttgcgcagggttcacatttatgaagaagttcgatgacgccaatcgagaggatgttgaatttatcggcgaaaacgcggtttttagcataacctgatagcaattgattatttgccggttgaattctcctgtgctgttattaaaggacttataacaaattcataaggcttataaccatgtctacagggaaaacgtttcttgcgctggcgttgagcgcgctactgccggcgtcaggcgcctgggcggcgggcaacgatacgctggtctattgttccgaagcttcgccggaatctttcaacccgcagattgccagctcgggcccgtctttcgtcgccagttcccaggtgctttataaccgcctgataaactttgacccggtcaaaaatacgccgattccctcgctggccaccgaatggcgcgtctccccggacggtaaaacctggactttcaccctgcgtaagggcgtgcagttcaacagcaacaaatacttcaagccgacccgtgatttcaacgccgatgacgtgctgttctcggtgctgcggcagaaagatgccagccatccgtaccataatgtttcccagggacattacgaatacttccacgacgttgggctggataagctgatcaaagacgtcaaaaaaatcgatgattatcacgtgcagtttgtgctgaacgagccgaacgcggcgttcctcgccgactggggaatggattttgcgtcgattctgtctgccgaatatgccgatgcgatgctgaaaaaaggcaccccggagtatgtcgatacctggcctattggtaccggaccctatgcgctgcagcaatataaagcggattcgctgatccgctatgtcgccaacccgcactactgggacggtgacgtgccgaccaaacacctgattttctcgatcacaccgaacgttgagacgcggctggcgaagctgcaaaccaatgaatgccagattatccccgcgccgtcgccggtacagttcccggtgattaagggcaataaagatctggcgctgcatgcggttgaggcgctcaacgtaggctatctggcctttaataccgagaaaaagccgtttgataacgtactggtgcgccaggcgctgaactacgctaccgacaagcaggcaatcgtgaaagcggtcttcctggactccggcagcgtcgcgaaatcgccgatccccgccaatatgctgggctataagaaagatctgcctgattacgactacgatccgcaaaaagcgaaagatctcctcaagcaggccgggctggaaaaaggggccgaagtcaccctgtggtcgatgcctgtgcagcggccgtataaccccaattcccgacgtattgccgagatgattcaaaatgactggagcaaggttgggatcaaagccaaaatcgttacttatgaatggggtgaatacctcgccggcatgcgtaaaggcgagcacgacagcgcgctgtttggctggatgtctgataatggcgatccggataacttcgccggcaccctgttaagctgcgataacattaaaaccggctctaacgttgcccgctggtgcgataagacctacgatgcgctggtgaaaaaggctatcctggtcagcgacccgcaggcgcgcgccggactctacgctcaggcgcaggagatttttcagcagcaggccccctggatcaccctggcgaccggtaacaccttctacgcgacgcgcagcaacgtgagcggctacagcgtgagcctgatgggcagcgatttttccaaagttaaactcaattaagccggaaggagagaagcatgtcgcatctggatgaggttgtcgcgcgcgtggacgccgcgattgccgaaagcgttattagccatatgaatgaactgctgatcgcgctgagcgatgacgcggggctggggcgggaagagcgctacgttcagcagcagcgtttgcgtaacgccatcgcccaccacggccgccagcagcacgaggagcaggaagctcgccgggagcagctgacccgcggcggcgagattcactagttacgccgctagaactggcgtctggccaccagccaggcgccgataaccagcatcaccgccccgcagagcgggccaaccagcgcgcgtagcgggacgtggtgcgcgcgaatcagatctagcactaagcccccaaccagctggctggcaatcaataccgcaatcgtggttgccgccccgacgttctgatagccgctgatgctggcaaagacaaagaacgagcccagcagaccgggaataagcgtccaccactttacgctgaccgccagctcctgaaaccccgccgcgccgtgcttaagcagcagtattgtcacgaaaatcacgatgccgaccagcgagttaagcagcatggcgatcaggatggtcgatgcggactgggtaatgcgcaccatcagcgtgttttgcagcaccagcccgacgccagcggcgattaaacaggccagggtcagcgtttgattcatgcgctgccgtccggatcgcggcgatcgtcaagctgcagctgcataaaggtcagatccagccagcggccaaatttcgtgccgacctgcggcatctgcccggtggtgataaagcccagcgtttcatgcagatgcaatgaagcctcgttttgcgcttcaatgccggcgaccatgacgtgcttattcagccgtttcgcctcggcgatgagggcgacgagcaggctgcggcccagccctttcccctgatgagcggggtggacatagacggaatgttcgacggtgtggcgaaagccgtcaaaggcgcgccagtcgccgaaggaggagtaaccggtaatcaccccgttttcttcgctcaccagcacgggataaccggctatctgccgggcttcgaaccaggcaatacggttgtcggtatcgacggttttgtcgttccagatggcggcggtatggacgaccgcatggttgtagatttcagcgattgccgcgcaatcgtctttgctggcatggcggatgctcatggtgtcctcaaagcttgtacactatagtagtacagtattattacaataatgtacgcaaggctgtcacctggtttaggcataaatttttcctctggctgaccaggtccgttgtgtgcgatgactgcgcgaccctgggttgcctgcgcagaaacatcatttgtatttatatttcatgattagagaatttattaaatatattactgttaatttgccgtcatattttacatttttatttaccggatttggattttcctgacatgcagaaaagaaattaatttaatcataactcattgattatattggtgatgatgtaaatcattgtgatggcagtccgctttttattttcacccaatagaactagtctaacccctgaagatatatttcggttaagcagagcgcatgtcgagaagttattcgatatggctctgttggattttatataacgatattctgtttacactattatgcgtatttatacgcagggaatgattttgctaacaagggtgaagcaatggcgcgtacacaaaatatgaagaaattaatgccgtcaatattggcaatggccatgggggctatattgggcaattccgctatggcggctgaaaccaccgcgctacaggcggcaccggcttataccgcgacgcagactaaaggggagacgctgtggagcaatgacgatacggcaatcggtattttaggatccgtacgtttaatggccaaaacggactctaatcatactcaggaacataatatacagaataatgactcgcggctgggggttgccgtgcggcataattttgacctgaacggcctgagtaattatgccgtcggttattatgagaccggcgttcatggtttagattccgccaccgatgaccagggcaatgatgtttatacgcggcaggcttatgccggtattggcaacgaccgctatggcgtggtgaccttcggcaaacagtatgctcccacggactgggggctgggtattgatacgacttatgcctggggcggtaaagcgaaacatgataccgccggaatgtcgacggatattattaattccgcggcaatctattattacaatgataacaatatgacgattggcgtcatggggcaaggcaatgacaacgtcgacagcatcggctttgcggcctacggcgatgggccgaatctgcatgacgcttaccgcgatggttcagccaccgttcacggcggcgccgcggctgccgcgcagtaccgttgggataacggcttctccgtctccagcgcggtggcgtataacaattacacggtaaatagcgggtcagtcagcggctgccagaattttggcccgaacggacactgttttaattacaccgataataacggcgatgcctatgacggcaatacttatagcatgggcatgaacgcgaaatatacgacaagcgttggcgatcatgcctggtataacggcgcggaggtgacttattacctcaataaagtgaatgatgttacagcggcgaccagcggccattacgaacataataaccagcagggtgatgaccaggaaacggtgcttggcctggaatatgattcacagtttaaaatcaccccggcctggagcgtgtacgttgattttaactggtcgcagggcggcgatgcgatggatgggcagcacttccagtcgacggtattaggcaccgattactggctggggaaaaacgcggtgacctatcttgaatacggctacgaaaaagcctggggcaacgataacgaagcgtggaatattgacgacaatcttggcgcagtggggctgcgcgtctttatctgacgggcgttttcttttcatttatggtcttgagggtgtttagttaacggattgcatccttttctgccttgcccggtggtgtattacgccgggccttttcacgataatcgccgctatcggcgtctggttgtagaaacagtagggctacactatagtgtcacgttatgaatactatagaagacaacctcaaccagcgcatcagcgcacgcatccgaatcgagcgggaatcccgcggctggtcgctcagcgaactcgccgagcgggctggggcgtcgcgggcgatgatccacaagatcgagcgcggcgaaagcagcccgacggcgtcgatgcttggacggctttccggcgccttcggcattagcatgtcgacgctgatcgccagggcggagatgcaggaaggcaagctgctgcgttttgctcatcagccggtgtggcacgatccgcagagccactatcttcggcgtcacgtttctccgcgtagcgacctgcctatcgatctggtgcaggtggaacttccggctggcagcgacgttcctatgcccgcgtcatcctatgcgctggcccggcagctcatctggctacagcagggcgaactggtctttctcgaaggcaacgcgcgccacgaaatgcaggcgggggattgcctggagctcgggccgccgaacgactgccgctttattaatgaaaccacgcagccctgcgtctatctggtggtccggctcaatcaatctgcctcataatgtcaatgcgcgttgccgggaaagcagctagcctcaatacagacttgtcaaaagaggagtttgttatggctttcaatccgcaacgccaccgccgttgggtgctggcatcccgtccgcacggcgagccgaccggggaaaacttccgcctggaagagggtgaggtcgcttctcccgggccgggacagctactgctgcgcaccgtctttctgtctttagatccctatatgcgcgggcggatgagcgacgcgccttcctattcgccgccggtcgccgttggcgcggtgatggtgggcggcaccgtgagccgcgtcgtgacatcgaaccatgatgattatcagcccggcgactgggtgctgggctacggcggctggcaggattatgaactctccgacggcagcgggctggtgaagttaggcgagagcccggaacacccttcctgggcgctggggatcctcggcatgccgggctttaccgcctatatggggctgctggatattggtcagccgaaagcgggtgaaacgctggtggtcgccgccgccaccgggccggttggcgcaacggtcggacagattgctaagctgaaaggctgccgtacggtgggcatcgctggcggcagcgagaagtgccgctatgcggtagaaaccctcggcttcgacgcctgcatcgatcaccgcgcgcccgatttcgccgtcaaactgcttgaagcctgcccgcaggggatcgatatctactatgagaacgtcggtgggaaagtgtttgatgaagtgctgccgctgctgaacacctcggctcgcgtgccggtttgcggcctggtcagcggctacaacgccaccgcgctgcccgacggcccggatcgtttaccgctgctgatggcgacaatcctcaaaaaacgcatccgtatgcagggctttattatcggccaggattacgggcaccggattgccgagttccagcaggagatggggcgctgggtgcaggcagggaaaatcaaataccgcgagcaggtggttgacggcctggagaacgcgccgcaggcgctcatcggtctgctgaagggcgagaacttcggtaaagtggtggttcgcgtctctcctgacgagtagctttttcccggcaggcatcgcgcctgccggttttatgatgatttacgcgtaaaaggccagccgctccgccagcaggtcaacaaacgcctggcgatcgacatcgagcatcaccgttgcgttcggcttcctgccggtcagattgtagaaatcgaccacggtcattccctgggtatatttcccctgcgtttccacgccgacccagcgttcaatggtggtaaacatctccggcttcagcagccaggcaatggtgcacgggtcgtgcagcggcgcgccgacaaagccccatttctcatccttatggtactcaaggaagaagtcgagcagttcggcgacgatggtggatatcgggttgccaatgcggcggaagcgctcaatatcctcaacgtgaatttgcgctttatgggtgacgtctaacccggccatcaccaccggaatgccggactggaaaacgatctccgccgcttccgggtcgacgtagatattaaactcgaccgccggctgccagttacccagcaccatcgcaccgcccattatcacgatgcgggcaattttggcatgcagttcagggtggctgttgagcagcagggcgacgttggtttgcgggccggttgcgacgatggtgaccggctcggcgctgtcgcgcagggttttggccatcagctcgacggcggtgcacgtctgggcggcaaagcccggttccggcagcgccggaccgtcaagaccgctctcgccatgcacgttatcggcgataatcagctcccgcatcaacggcttgagcgcgccgccggctaccggaatatccgggcgcttaagcagggtgagcatccgcaggacgttgcgcagggttttgtccggggtctgatttcccgcggaagaggtgacggctttaacattgagttcgggtgaggcgagggcaagaacgagggcaatcgcgtcatcatgacccggatcgcaatcgataatcactggcagtgccatagcagctccttgttggcgttattttgtgacaagggtaacgccgtaaagcggtatagacgaggcttagcgcaggatagtgtgatgacgtgcacgattgagcgccgatatcgcgcgacgccttgccaatctatctgcctgatccttgcgcaatcagggggtagtcatgcggtggcgcaaaaagtcgcttctcgcggaggcctataatgataaaacgactcaaccatacaaatattcatggtttgctttccgccaacggattcttattctaaagaaaacttcaagaggtaaccgcaatgaaagatgttgtagataaatgcagtaccaaaggctgcgccattgacgtgggctcgattattgataatgaggactgcgtctggcgggtagagaaaaacttcgccacccgcgaagaggccgagtccaccatcgcggccgtccgcgaacgcgccctggccgccgcgcccgccagcgagccgccgcaggtcgactataccatcgtggccgccggcgatgaggcaaagcttgaggcttcgattgccttctcctgccaggcggaaaagatcattttcgaattgtcgttaagaaacgtgatttaacgccatcgagcatccacggctaaccctcaacaggatcctgcaagcgatcccgttgaggtcccgcaatcaagcgttactcaaaccgccatgccagatttagaccgataccgtaattacggcccggcgccggttcgtagtagcggccgttggattcgttaacgataaccgagcccgcgtagctgcggtcgaacaggttatcgacgcggccaaacagatccatatccattttgccgtagctccatttatagccggtcgtcaggccgaccaccgtccaggatggggctttggcggtgttctcatcgttagccataatatcgctcatatagcgaatatcgctgcccgcgtaccagcctttttcgggctggtagccaaaggaggcatagcccatgttgcgggcgatccccggaatgcgattgcctttacagctggtatcatcacagacgttggtacgataggtcgcatccagccaggtccaggccgcttttaaacgccagctctcgccgaactgctgatccagccccagctccatcccctggcgacgggttttcccggcgtttttgtagctggtacgcccgccgctgctggcgtcgacgacaatctcattgtcggtgtcggtctggaacagcgctgcggtcaacaggccgttgccgatacgcgccttgctgccaatttcaacggtttcgttggtggacggctgcaggccaaagttcagcccgccctggtcgccggagcgataggaaagctcattaatggtcggcgtttcgaaaccacggccggcggagacgtagacgttccacgcgtcggttaccgcatatttcagcgatcctgccggcagccatttatgatagctggcctcgccgctgtcatcaccgttgcccggcgtaatgtaataatcgttggaatcgaaccaaaccgagctgtagcgcacacccgcgtccagagagagtttctcggtgagctgccactgggtttgcagatagggatcgacgttccacatcaggttacgctcgttgcggcgaaggtctcccttttcaccgtactgcggcgcgccgttgctcataacaaagttttcgtaacctttgcggcgctcgctcatggtttcgtaatcaagaccggtggtaaaggtgaccggcaccagcagctcgccgcggtgggtccagcgggtatcaattccctggtagtgacgcgtcaggtcgataacgccgccagcatgggtgggtttgagctgcggcgcgcgaggaatcgattgatactgcgtggtttcacgttcaccggcgtacatcatcacgctcagatcgtcctgctcgctcagctgtcgctcgtagcgtaaaccggcctgggtctgtttgatggttttgcgggtattgtactcatcgcctcttggcgactggcgcggattattttgccattcgtcgtagctcaggccgcccgcgtcattagctttaatatccacgctgttaaacagcagggtcagcttactgacgtcattgatgcgcacgccgagcttcgcgttggcgagattcttacgcgcgccgctatggtcgcgggagccgtgggtagtgaagcggttggtggaaaccacgtagtcgacgtcgcccgcatggctgccgtcgcccaccgcgccggtcgctttcataccgtaatgccaggtgccaaagctgccgtagtagctgctggcttcgatagtaggcggctggcttccggtctggctggtggcgttgatcaccccgccggaggagttaccgtacagggcggaaaaaggtccgcgcagcacctcgagcgaatcgaggctgccaatatcaatattcgaggtttgcccctggccatctggcatggtggccgggataccgtcgacgtaaatacgcagcccgcgcacgccgtaggtggagcgggacccgaagccgcgaatcgaaagctgcagatcctgcgcgtagttctggcggttttgcacctgcagtcccggtaccgcgcccagcgactcggagaggtttacccgcggcgcggcctggcgcatctcatcgccgttaaccacgctaacggcggcgggggtatcgagttcagaaaccgccgacggcgcggcggtaaccaccatagtctgttcagcggcgagagcggttggccctgcggagaccagcggcaaaagcagagcggggagcgcggcggcgcgcacggaaaggattttcatcaaagttactcacaaaacgaaccaaacggaacatatgtatatatgttagctcttttgtaaattttttgaaaagacttaacggaatttgagttaacaaatagcaagaattgcgagatgccgagagcgctacgggtaattaacgctccacattgcgataaataatgattactattcgcattccaaagaagagcgcaaagcgatgattttgcgccccggaagcactgtcgagcaggcatatatttgttttatcaaagggagtcgtcatgtcattacgtcatctgtccgcgccgcgtctgcgccgttcactgttgttaacttcgttactgctggcggggagctttagcgcccacgcggcggaagaaatgctgcgcaaagccgtcggcaagggcgcatacgaaatggcctatagccagcaggagaatgcgctgtgggtggccacctcgcaaagccgttcgctggataaaggcggtatcgtttaccgtctcgatccgacgactctcgaagtcacgcagattattcataacgatctgaaacccttcggcgcgacgatcgataacgccactcagaccctgtggtttggcaacaccaccgacagcaccgtcaccgccattgatgctaaaaccgggaaagtgaaagggcgtctggtgcttgacgcccgccagcgcagcgaaaccgtacgtccgctggccccgcgcgagctggcggtcaacgagaaaaccaacaccgtctacatcaccgggctgggtaaagagagcgtgatttgggtggtggatggcgacaagctaacgctgaaagacaccatcgccaatactggcgcaatggcgaccggcctggcgctggacgcggaagcgaaccgtatctataccaccaatgccgacggggaactggtgactatcgacagcaccagcaacaaaatcctgtcgcgtaaaaagctgcaggatgatggcaaagagcacttctatctcaacctgagtctggataccgccggacatcgcgcctttatcaccgacggtaaacagccggaagtgctggtggtcgatattcgcgatggcaaagtgctggagaagatcgccgcgccggagtccctggccgtgctgtttaacccgacccgcaatgaagcctacgtgacgcaccgtaaagccggcgaagtgagcgtgatcgatggtaagacctacaaagtggtcaagaccttcaaaacgccgactcatccgaacagcctgacgctctccgccgatggtaaaacgctgtacgtcagcgtgaagcaggagtcgacgcgtcagaaagaggcgacccagccggatgacgttatccgcatcgcgctgtgatcctgacgggagggggcaacctctcccgccatcagagcgctcgcactgcagccgggtggcggattacgcctcacccggcctacaaaatgcactgtttctgtctgcccgaaaaccgcacccatccagatatcaccctctgttacaaacacttattagcctgataaatgtaatggctataaacttacaactttcctgcgcaagcgggacggtggcattaatcctggagaaaagatgaaaaaatcattaatggttgtttgcgccggcgcgatgctggctcttctggcgggctgtagctcaaactatgtcatgacgacaaaaagcgggcagactatcgtaacgcagggcaagccgaagctggataaagataccggaatgaccagctatactgatgagtcgggcaataagcgccagattaacagcagcgatgtggctcagctggtggaggataattaagttgtgcctttgcggtttgcccggtgaggcaaaccgcaacgtgatttattgctgtttttcaatattcggcgcggtgctatgaatgtcatgcacgcgcttgcgcacgccaaaccagccggcgaccagcaaaacggcaatcagcggaagcgaaccgatggtataagtcccattcggataatcgaaagccattaataccagcacgctaagcaggaacagcagggtcagccaggaggtgaagggcgcacccggcatcttgaagctaacgtccgccgctttgccttccttgatcgccttacgcaggcgcatctggcacaccacaataaagccccatgaagcgataatccccagcgacgcgacgttaaggacaatttcaaatacctgcgaaggcaccaggtagttgaggaataccccaacgacatagacgcccagcgtcgccagaatcccggcgtagggcacgtggtggcggctcattttcgacataaacttcggcgccgaaccgcccatcgacatggagcgcagaatacgcccggtgcagtagaggccggagttgaggctggagagcgcggcggttaacaccacgatattcatcacgctgccgatatacggcacgcccagcttcgagaagaaggtgacgaacgggctctgcccggcctgataggcattccacggcagcagcagcaccagcagcagcacggagccaacgtagaacagaccaatacgccagataacgctgttaatggcgcgcggcaccatggtctgcgggtctttacactcgccagcggcggtacccaccagttcgatagaggcgaaggcgaacaccaccccctgtaccagcaccagcgccggcagcaggccgtgcgggaacaggccgccgttatcggtaatcaggtggaaaccggtggcattgccatccagaggctttccgctgccaagaaaaatagtcccgaccaccagaaacgcgacgatcgccagaactttcaccagcgcgaaccagaactccatctcggcgaaccatttcacgccgatcatgttcatggtgccgacaatcgccagcgcgccgagggcgaagacccactgcggaacgtcgccaaacgcgccccagtagtgcatatacagcgcgacggcggtgatatcgacgatcccggtcatcgcccagttgataaagtacatccagcccgcaacgtaagccgctttttcgccgaggaactcgcgggcgtaggagacgaagctgccgctggaggggcgatgaagcaccagctcgcccagcgcgcgtaagataaagaacgagaagaggccgcagaccagataaaccagcgccagggccggtccggccatctgcaggcgcgcgcccgcgccgaggaacaggccggtaccaatcgcgccgccgatggcaatcatctgcacctgacggttgcccatcgccttgtggtagcccgactcctgcgagttcagccagtggcgtttggcagcgtgctgctccgccacgctagagtgttttgtattcattgatgtcgctattttcctgtcaatgtccatgaagtggttcgtgctgctggctctctcatcattctgaggaatgagataagcgagcatggcggagaatcctacacgtatcggaaaatggacgcacgcaaaagatttgcggacagcacttgcttaaatatcaatgagatcggaagcttttcggtgttcgcgcatgacggggaaattttgctcatcgttttatcgttattgcgctattattctccgcccgcgttttgcccgagagaccacgatgaaaatcaacgtagtagggaccagcggcgtcggcaaatccaccctcgcgcgtcggctggctcaggaactgtcactgccttatattgaaatggatgtgctctactggctgcccgagtggcaagggacgccggacgatgagttctacgccaaactcgccgccgcgctcgccgcgcccggctgggtgctggacggcaactataaccgcagccgcccggtaaaatggcgcgatgtggatctggtggtatgggtggactacagcttctggcgcacgatccgccaggcggtccgtcgcgcggcttcacgcgcaagccgacggcaggagctgtggcccggcaccggcaattgcgaaaccttccgccgctctttctttagccgggactctattattctctggacgctgaaaacctggcgcaacaatcgccggcgttacctggcggatatgcaggacccgcagtatcaacacattcgctttgttcgtttacgcgaccagcagcagaccgaggcgctggtgcgcgagcttcggcagaatagccgataatcccccggctcgcgctgcgcttagccgggctaccggaccgcagattgtcggtaacccgtagcccgggtaaggcgtttacgccgcaacccggggaatatgccgtgacgtggcattgctgcggcttcttcccggcttgcgctgcgcttagccgggctaccgaaccgcagattgctggtaacccgtagcccgggtaaggcgtttacgccgcaacccggggaatatgccgtgacgtggcattgctgcggcttcttcccggcttgcacagctcctgcccgggctaccgggccacagattgctgaggacgcgtagcccggacagatgcgcagcatcgcctccggggcagttacctcaccgcatatctaatttccggcagagcacatgtaaataaattgtttctcaccagccgcgggcgcttctaataatgcagtcatgttaatccacatgagcctgcgaaatgtcttatcgaatcagtatcctggataaaagcccgctggcagccggagaaacggctgcccaggcgctggcgcgtacattaacgcttgcgcaacaggcggaagcctggggctatcatcgcttctggatagccgaacaccacaatactgaccagctcgccagtccgtcgccagagctggccattgcctggatcctcggccagacccgcaggattcgcgttggctccggcggcgtcatgctgcagcactacagcccgtataaagtggcggaaaacttcaatatgctggcttccctcgccccgggccgcgtggatctgggcgtgggcaaagcccccggcggactgccgctctccactcgcgcgttgcagcaggggcttaacccccagcaaaaggggcgttttgccgaccagctggcgcagctcgacaactggctgtcgctgaccgaaaccgacggtgaggagagcgtccgcgcaacgccgatcccgccgcgtcgcgccgacggctttctgctcggcgccagcctggagagcgcgcagctggcggcgcagctggactggaacttcgtcttcgccgcccatctcaacggcgataagcagctgctgcgcgaggtgttaacccgctggcgcgaactgagccgtcgcgacgcgattattgccgtccaggtcatcgtggccgaagaggccgcgacggcggcggagctggcaaaatccgtcgaaacgtggggcgttgagctggaaaacggccagcgggtcaccgtcggcagcgaagcgcaggcggccgcctttgcccgtcaggcgggcagcaggccgacgcgcatcgcccggcgggaatcggcggtgctgttcggcaccccggaacaggtgaaagcgcagctggatgccctgcagtcggcctggaacatcgacgaatttattatcgacacgcccattagcgatggcgcggcgcgccttaactccctgcgtctgctggcccgggcgcatttgagcgcggaggtgcagccatgagcctttccgaacagttaattcgctggcggcgcgaactgcaccagtacccggagctctcgctgcaggaggtcgacaccaccgcacgtattcgcgactggctgcagagcggcggcatcagcctgctgccttatgaactgaaaaccggcgcggttgccgaagtgggcagcggcgataaggtgatagccctgcgtgccgatatcgatgcgctgcctatcgaagaggcggccagcgtgccgtttcgctcgttgaatgccggcgtaatgcatgcttgcgggcatgatattcataccagcgtgatccttggcgcggccttactgctgaaacaacgcgaagcgcagctggcgggacgcgtccgtattctgttccagccggcggaggagagcttcggcggcgcgaaaaccctgattcgcgccggcgtgctggagggcgtttccgccattttcggtatgcataatgaacccgggctgccggtgggcgaattcgccacccgaggcggcgcgttttacgccaacgtcgatcgctttgtgtttaaggtgaccggcaaaggcgctcacgccgcccggcctcatgaagggaaggacgccattctgctggccagccagctggtgaccctgctgcaaagcgtcgccagtcgcgaagtgaataccctcgattccgtggtgcttagcgtcacgcggattcagggcggcaatacctggaacgtcctgccggaaagcgtcgagctggaaggtacgctgcgcacccacagcagcgcagtccagcagcgggtgaaagcgcgggtgagcgagattgccgccggcttcgccagcgcctttggcgcgcagatcgatgtcttctggtacgccggaccgaccgcgctggttaatgatgagcgctgggccgctttcgccagcgacgtggccgataagtctggctaccgcacgcaccatgcggatctccatctcggcggagaggattttgccatttatcttcagcatattcccggcgcgttcgtcagcatcggaagcgccagcgaatttggtcttcaccatccggcgtttaacccggatgagcgtttaatcgccccggcggcgcactactttgccgatctggcagagcaggcattaaaagcactttaattattcagggtcattgactaaggattaacgatgtctgaacaacggcagctgcgcattggtactatattacacggcgcatcgggaaatatgtccgcctggcgtcatccggccgcgctggccgacgccagtattaactttgagttcgtcaagcagacggcgttaaaagcggaagagggcaagctcgattttatttttgttgccgatggcttatatattaatgaaaaatcgatcccgcattttttaaatcgttttgaaccgctcaccgtattatccacccttgcggcggtaacttcgcgtttaggcctggtcggtaccctgtcgacctcctacagcgaaccctttaccaccgcccgccagttcgccagcctcgatcatctgagcggcggccgcgcgggctggaacgtggtcacctcgccgctggaaggttcagcaaaaaacttctcccgcgcccagcatcccgatcatgcgctgcgctaccgtattgccgatgaatatctgcaggttgtcaaaggcctgtgggactcctgggagcaggacgcgtttattcgtaataaagagagcggccagttctttgataaaaataagctgcacacgcttaatcatcatggcgatttctttaaagtagccggtccgctaaatattgcccgcacgccgcagggccggcccattatctttcaggcgggcgcctccgatgacggtaaaaagttagccgccagccacgctgacgctatttttacccatcaggagtcgctggcggaggcgcaggccttttatcgcgacgtcaaaagccagcttgcagcgcacggccgccgggagagtgaactgcatatcttccagggcgtcagcgtcatcgttggcgacagcgccgacgatgtggagcagcaataccagaccaccgctgcgctggtatcgattgaagacgcgctgaattatctcggccgctattttgaacaccacgactttgcccagtatccgctggatgaggcgttcccggatatcggcgacctcgggcagaacagctttcgcagcaccaccgacgagataaaacgcaatgcccgcgaacgcggcctgacgctgcgccaggtggcgctggaggcggccagcccgcgaccgcgctttgccggaaccgccgaagaggtggcggatggtctgcagcagtggtttgaacagcgtgcggcggacggttttattatccagggcggtacgccggataccttcccgcgctttgtggatcaggtggtaccgattcttcagcagcgcggactattccgccgggaatatcccggcaccacgctgcgcgaaagcttagggctggcagagcccgtgaatcaattccaaaaacaataatagagaacacccgctatgcagaaaacgcagaaaaaatcgctattactggcgctggcgctggccgttagcgcgtcatcctgggcgcagaacgtcacgatcaacgacaccggcgtgagcctcgaagccaacaaaacgccgattcatacggcgaaaaacccgcaggctatcgcgcagctgccgaaaggtctccacctggcggtgccgggtaagctgacggtcgcggtcgccgcgctgaactcaccgccgctgaccgtgttttctgacgataacaaaaccctgctcggcagcgaggtggatatcgcccgcctggtggccgacagcctcgggctggagctgaatgtggtacccacctcgtgggaggactggccgctcggcgttgcttccggcaaatatgatgcggcggtcagcaatatcaccgtgaccaaagagcgcaaagagaagtttgatttcgccacctaccgcaaagattcgctgggtttttacgtcaagagcaccagtccgctgagcaaaattgaaaaagcggaagatattgccgggctgcggattatcgtcggctccggcaccaatcaggaagccattttgctggcgtggaacgccgagaatctcaagaaggggctgaagccgtttacgccggtctacaccaaagacgacgccgcccagaccctggcgctgcagtccgggcgcgccgacgccttcttcggccccaacgtgatcggcgcgtggaaagcggcgctgaccggcaaaaccaagctggtaggcagcgttgacggcggctggccgaaggcggcgcatattgccgtgacggtgaaaaaaggcagcggtctggtagaaccggtacagacggcgctgaacggcgcaatccgcagcggcgactacgcgaaggtgctgaaccgctggggggaaggcgtggagagcattccgcaatcggaaatcaacccggccggactcggcgactaacaggaggcatgatgagcgatctattccgcgatgtctctccggaagcgccggagctgcagccgattattgagggcctgttcggcgagtacgccgcgcgctacggcgactatttctcccgcgatgccgaagtcgagctgactgaatggtatctggcgccgcaggggctgtttatcgtgctggagcgcgaaggggaaattatcgccaccggcgcgtacaaaccgaaagatgcccatacggcagaaatcaaacgtatctggacccatcgtcgtctgcgccagcaggggctggcggcgaaagtggtgcaggagctggagcgacgggcgctgctcgcgggctacagccatatctatctgaccaccggttttcggcagccggaagcggtgcggctctacctgagccagggctacgaggcgcagtttgacctcagccgcgatccggaagagtacagcctgccgccgttcgatggtcgactgcgctttacgaaagcgctggcggtcagcgcgctgagccagagcgcttaaggagccaatatgcatacccaggaaacgattaaggttgtccccgcgcgctatccgctgcgggcggtaggtgcgctgctggcgctgctggtgctggcggtggtgattcaatcggtcgcctttaacccgcgctgggagtggcgcgtctttgcccgctggttctttgacccggtgatccttgaaggtctcgggcagacgctgctgctgaccctgctggcgacggcgctgagcgttattctcggcggcctgctggcgctggcccggctctccagttcatggctgctgagcagcctggcctggggctatatctggctgttccgctcgctgccgctgatcgtggtgctgattattctttacaacttctcctatctttacgacacgctagcgataggcattccgttcaccgcgattcgctgggccagctttgagaccatcaacgtactggggcagttttctaccgccgttgtcgggctgactctggtgcaaagcgcctacaccgccgaaattatccgcggcggctttctcggggtcgatcacgggcagtatgaagcggcggcggcgctggggcttccggccagccgtcggaccctgcgcattattctgcctcaggcgctgcgcaccattttaccggcgggctttaacgaaattatcagcctcgccaaggggacggctatggtttacgtgctggcgatgccggagctgttttacaccatccagatgatctataaccgcacccaggaagtgatcccgctgctgatggtcggcgccgcctggtatctggcgatcaccagcgtgctgtcgctgatccagtatctggtcgagcgcggactggcccgcagcgaacgccgctcggcggtcaatagcgcccgcagcagccgtcgcgttgagtccattcgtcgcccacaaccccaggagtccgcccatgcccaactctcgtaacggccatatctccatcaccggcgtcagcaaatattttggccgccataaagcgcttgatgacgtatcgctggaaatcgaacccggcacggtgacggtgatcctcgggccgtccggttcgggaaaatcgacgctgctgcgggcgattaatcatctggagcgcgtggatgaaggctttattcagatcgatggcgactatatcggctatcgccgtaaaggcgacaagctctacgagctgaaagagaaagagatcctccgccagcgggttaacgtcggctacgtatttcagaacttcaacctgttcccgcatctgacggtgctggaaaatctgattgaagcccccatcgcccataagcaggcgacccgcaaagaggcgatcgcgcgggcgtatgaactgctggacgtggtcggactgcgcaataaagccgacgcctggtcgcggcacctgtccggcggccagcagcagcgcatcgctattgcccgggcgctggcgcttaacccgcgggtaatgctgttcgatgaaccgacctccgcgctcgaccctgagctggtgggggaagtgctggacgtgattaaaaagctggcgcgctccggcaccacgctggtggtggtcacccatgaaatcggttttgcgaaagaggtggcggaccgggtggtgtttatggtcgacggcaagatagtcgagcagggcagcagcgacgccgtgctgaaccaaccgcagcatccgcgtacgcggcagttcttatcgagggtattagcggcatgagaaacggacttttggccctgacactactctctttatctgcggcatcgcaggcggctatcgacctgcgcgccaacgagcagccgctgccggtgacccgcgatgagcaggcgatcgcgaagatcccggcaaattacgccttcgtcgaaccgggtaccttaacggtggcgatttcggcgctcaattcgccgccgctggcgctactggccagcgataaccgcacgcgtatcggcagcgacccggatattgcccggctgctggccggcagcctcgggctgaagctaaagctggtgcccaccgcctgggaggactggccgctggggattacttccggacgctacgacgtcgcgctggtcaatattgcggtgaccgagcagcggaaggagaagtttgattttgccacctatcgcgttgactctctggccttttccgtgaaatcaaccagcgatatcgcccgcgtgagcggtccggcggatctcgcgggtaaaaaagtgatcgtcgggtccgggactaaccaggaacggattttgctcggctggaacgccgaaaacgaagccgccgggcggcaacccgcgctgccggtctacctgaccgatgacgcctcgggcaacctctatattcagtccggtcgcgcggacgtgttctttgggccgcagtcggtggcggcctataaagcggcgctcagcggcaaaaccaaagtcgtcggcctggggccgaaaaaagcgtacgttgccaccacgaccaaaaagggcaacggcctggctccggcgctgcaggcggcgctgaacggcgcgattgctcgcggcgagtatcagaaagtgctggcgcgctggggagagcagggcgaagaggtgacgcaatcggaagtgaatccgccggggataacctactaaaaaaccgctgtttcgcaggagtgtgatgcgaaacagcggaggcgaatgctcgccagggttttaaatcaggcggcgcgcggggtcagcgtcaaacggtccagcggcccgacgataaacagataggagaacaggcccagcacgcccatggaaccgacgtacaggatggcgtaatcaaaggagtgggtattagcgaggatcacgccgataaccagcggcgtgataatactcgccaggttgccgcacatgttgaacactccgccggcaattcccagcatttccttcggcgaggtgtcgctcagcacgcaccagccgaggttaccgaaacctttagcaaagaaggccaggctcatggcggcgatcgccaccacttccgaggtggtgtagttggcgacgacaatcacgcaggagagcagcatgccgcagatcaccggcagcttgcgggcggtagtcaggctgtagccgcgtttgagcagccagtctgagaataccccaccgagcagtccgccgataaatccggcaatggccgggatactggcgacaaaaccgaccttgaggatcgacatacctttggcctggtagagataggtgggaaaccacgtcaggaagaaccaggtaatggacgttacgcagaactggccgatatacacgccgatcatcatgcgattaacgcagacgcttttaatctgcgcgagggttaatttttgctgcgtttttttcgtacctaattccggctcgccgccgccttggcgaatatagtcgagctcctgttggttaattttgggatggtaagagggatctcttacttttaccagccagaatatccccagcaccacgccgatagcgccaatataataaaatacgtagtgccagcttaaattatgcagaataatcgtcattagcggcgtaataattcccagggaaatatactgcgcggcctgatagaccgaggtgacgaatccacgctctttattgggaaaccactgtacgctgagacggctgttagcggggaaggcgggcgcttcaatcgcgcccatcatcagacgcagaatcaccagtacgatcaatgggctggcgaacagatagatcgttccctgaaacatggtgacgatcgaccagccaatcagcgcgcagccgtaaaccagccgcgaaccatatttatccagcagccagccgccgggtatttgcataatgacgtaggagataccaaaaactgaaaaggccagccccatcgcctcgggatcaaagcctaactctttgctcataataggcgcgacgacggacagcgttgcccggtcggcataattaaatacggtagccagaaataaaaacagtaatatgccgtaacgcacgttgctgcgttttaagggggtagtcatcttcaactcctttgcagggttgtttattgtgggtacagtcaataagaggtatttccccggcagggctacaggttttcagtcatctgcggaccggtagcccttacgccgccatccggggaattcggttaagggcgtttaccaaactcgcagctttgctgggtccagcggcgggcctgttcgctcagggtaaagcccagaccgtggcgttcggaaacccacatccgcccgtcgcgcagctccagctgttcgttaaacagcggattcagccactcgaagtgctccagccacggctcgagcgggtaggcggcggcgagatgcaggtgtacctccatcgcaaagtgcggggccagcttgcgaccgtgcttcgccgccagatccataatcttcagaaacggggagatcccgccgacgcgcggcgcatccggctggacaaagtcgctggcgttgccgaggataagctgctcatgttcgcggaagctggtcagcatctcgccggtggcaatcggcgtatccagcgcggcggcgagctgcgcgtggccttcaacatcgtaggcgtcaaggggctcttcaatccagatcagattgaactgctccattttgcgccccatgcggatagcggtttcgcgatcccactgctggttggcgtccaccatcagcgggaagtcatcgcccagcacctcacgcaccgccgtcaggcgacgaatatcttcggcggtattcggctgaccaaccttcagcttaatcccgccaatcccgttctcacgggagatagccacgttttttaacacctgatccagcggcgtatgcaggaagccgccggaggtgttgtagcactgaacggaatcgcggtgcgagcccagcagtttcgccagcggtagtccggcgcgtttggctttcatatcccacagcgcaatatcaagaggggagatggcctgtaccgccataccgctgcggccaacggatgcgccggcccacagtagtttggtgtagatcttgtcgatatcgttcggatcttcgccgagcagattatcggcgatctctttggcgtgggcgtaaatgccctggccgcccgcacgcttggaatagctgaagccaacgccttcaaagccgtcccgggagcggatttccgcgatgatgatcgccacttcggtaagcggtttttgccgaccggtcagaacctttgcatcgctaacgggggtcgccagcggcagaaaggccagcgacagtttgacgtgttcaatgcggtcgccggtttcagcggcggttttgacgccggaagctttggcgtaggtcacggactcggaattagcgctcgaggtcatagtcagttcctttttagtgataaaatgtttgcgctaacatttttaatcctgaaattgtcctggcgctacgacagtgattttaatttgtacaaacgatcacaattagcggttataaagggtaaaattatgcagcgcaggtcacgatccaaaaaggtttgtgaaaaatcacaaataaaaatgatagcgataacattttgtgtttcaggtatttgattctattggggatgtcgaggtgagcgctggcaattgcgcgggccatcatcaataatggccacagaaaacgactcaacacaggggcttagtcgtgaaaagcagaaaaccgacgcgcgcgccgacgctggatgacgtagcccgtagcgccggattgtcgtcgatgacggtcagccgggcgctgaatacgccgcagctggtgaggccaaaaacggtcgagaaagtgatgcaggcggtgcaggcaacgggctatatccctaacgcgctggccggcggcctggcctccaggcgcagcaagctggtggccgtggtggtgccgcaaatcaataacaatatgtttgtcgataccatccaggcgctgagcgataccctggcggcgcgcggctaccatatgctgctgtgcgtggcgggctacagccggcagaccgaagccgagctggtagcaaccttactctcccggcgtccggatggcgtggtattgaccggcattcagcacgccccggcgctgaagaagacgatcctcaacgccgccacgccggtggtggaaatctgggatctcaccccgacgccgctggatatgctggtcggtttttcgcatgaaaaagtcggcgaaaccattggcgagtacctgctggaaaaaggctaccgccgcccgggtctgctgtgggccggcgatgcgcgcgcgacgttacgaaagcaggggctccgcgcccggctggccaaaaacggcattgacgatgcgccgcaggtcgaggtgccgcttccggcatcgctggcgctggggcgtcgcgggctggccgagctgctcgccggcggcgagtttgacgttatcgtctgcagctccgatacccttgcccagggggcgattatggaagccgaaagccgggggctgcgcgtgccgcaggatctggcggtgatcggttttggcgatctggacttcgccgccagcaaccgtccggccatcaccaccgtcagcgtcgaccggcatgccatcggcgagcaggcggccacgctgcttgccgaccgcatagaaggcggagaagaacgggaagcgattattgatatcggctttcacctggtggcgcgcgagtcggcgtagctttgccgtttcgcatgtgcgagggggcctcaatagcggcatggcgtaatcaaatctatactgcaaaattgctaaacccgtcgccgctctgttcctgagcggcaaattcatcgagggcgcagaatatgatcaccgtctatggcgtacccggctggggctcaacaattagcgaactgatgctgacgctggccgatctcccgtaccattttgttaacgttgagggctttgaccagccgggcccgcagcgcgaccgcctcaaaaagataaacccgctgtgtcaggtgccgaccctgacgcttgcagacggcagcgtgatgaccgaatccgcggcgattgccctgatgatcctcgacgttcgaccggatctggctccggcgccgggatcgccgcagcggcatgcctttcagcgtctgctcatctggctggtggcgaacgtctatcccacctttacctttgcggattacccggagcgctgggccgccgatgcgccagaccagctgcgggaaagctgcatcagctatcgcaaatcgctctatctatggctggaggagcagcttgccgccgcgccgtatgcgctggggacggaaataaccctgctggactgctatattgcggcgatgtgcgcctggggcccgcgccgggagtggtttgcggcgcagacgccaaaattcgtcgccgtggcggatgcggtgtatcgccatcccaaactcgaagccgttctgcgccgcaacgagctgatttaaagcacaaaaagcgatccggattatgctagttttatcgtccagacaataaaggagcctgctatgccgcacgttgatattaaatgttttccccgcgacctgaatgatgaacaaaaagcggcgctggccgccgatattaccgaggtgttgattcgccatctcaacagcaaagagagttcagtgagcgtggccctgaagcaggttgagccgagcgactggcagcaggtgtgggacagcgaaatcgccccgcagatggaacagttgattaagaaaccgggctatagcatgtaacccggtttctttcccggaggcgatgctgcgcatctgtccgggctacgcgttcccggtgatctgcggtccggtagcccgggcaaggcgctctgcgccgcccccgggagaggggcactgaagcgaagtcatgagcgatacatcttgtcatgggtaaacgcgtcaccatgtacagggtacataaaactccttgattaatgtaccctgtacatgtattttgtctggtaagtcgtaaggacatcagggaatgagatgtttacttttattgaactacaaggtttcagtaaacgacgccaggcgctgttaccggatgatgaatttcgggccttccaggaaatcctgatcaatgatcctgaggcaggtgacaccatttcgggaaccggaggttttcgtaaaatccgctggagtcgtcccggaacgggaaagcgcggcggcgtgcgggtgatttactataatgtaacgataaagggaagaatctacctggcgctcatctatcctaaaaatgaacaggatgagttaagccaggagcagaaaaagatgttaaggcaggttgctgagttattaaactagccaataaacatgaagtgaggctgagctattaatgatcgatacattgatagcgccagagagccaactgaggtgtgtatgaaagacgaattgtttgccgatctgctggctagtgcagaagaaatggtcaggattgagaagggtgaacaaacgccgaaggtgcaccacgttcataccttcagcgaagttgatgtgaaagcgatacgcgaagccacaggtttaaaacagcaggacttcgccgccgccgttggcgttagctatgagctggttaaaagctgggaaacgaaacgacgtcatccaaccggtgcatccagaaagctgcttttattgcttcagggcaatccattgattatcaacttgttgaaggttatttgaaacgttattcttcgcaaggaaaatgacagagtttgccccatttcgtaaccagggcctttaaaaaggagagtattacgtatggaaaccaatgattctattttgacagaagtcgagaaatacagcgctcatattttatggtttttattttgttagtttaatgtacttcatactgtactggcatagtgacaaagtaaccgcgagtgtttaaataaacccgtccaggcgtttaccccggacgggctattttattaaaaccaaatctccgtctgcacgccgaagttccagttccccccggcggtaaagcctttactgccgaaatcatcgttgatcgcgtagcgatccagatctttatcccagttcatccacgtaacaaagaaacgtatctccggccgcgctttaatatccaatacatcgcccactttaaacgtcggggcgaaggtcagcttgtaaaaatcgccgctcaccgcctggtattgatgcacgccgctgtcgtagcgataggttcgtccgttgggattcaggtccatatattgccaggacgcctcgtacagcagggcgaagttgcgggtgatcccctgagaaacccgcaggttgaaggttgcccaatcgtagcggtccccgtcgcgatagcggtcttcgctatgctgggcgataaccgatggcgcaagctgccagtttttccccagcggcaaaataccgtatgacgcaaagcgcagagatttggcgttttcggtaagatcgccgtcgctgcccggctgccgcgcttcggcgcccagcccgccgccgtactgcagggcgctctccgatacgcccggcgcgaggccatagaattgctgtttgtcgtgatacgccagcatcgcgtagtagccgtttttcgccgtattatcgctgcgcagggcgtagctgccggtcgtcgacgtcgtatctttcaggtcatcgttaccctgggcggtcatcgccgtggtcatcagctgccagttgttccagaagtggttggcggtaaacatcaggttctgtatatcgttatcctgatagttatcgctgcccaattcgccaaagctgcgcgcatagaccgagtaatcgccgcgcagcgtgctgttccagttgacgtcattgatcccgccgccggtaccgccgaggaacataatatcgctatcggtaaagtggatatcgaagttatcgcggtcgaaacgcttgcccgcccagatggaggcgctcctgaacggcccggaaaaatcggcgaaattacccatctcgacgtacagctgacgcacgttcagatggtgactgtcgttatcctgcacccacggatccgggttggtcgcgccgtcggcaagcatggttttaaagtgcgcccacgacccgtcgctgaaggtcatttttttgccgaagctgagctccacgtagttatctttctcattgccgagacggccaacgtgggcgtcaccgttgagcgaactggccggcgagatccccggaccgccgcgcgcgcctttgccgtggctgttgaccagcattccggagcgggcgtaggcgttaaattcaaaaccgtcggtaaggcgggttttcgccagctgtttgtcggcagcctgctgcttttgctccgtggcatcggtgcgctggcttaacgtctgcacctgtttttccgccgccgccgcacgctgttctgccgcgctggtgcgcagctccgcctgctgcgcccgacgtttagcctctccggcctcctgctccgcatgattaagccgggcctccagcagcgccagccgttgttcgacggtgagcggggccgcatttgcgccgtaagccgaaaaaagggcgcagcaaaccgccgcgctaatcaaagagatacgcatattaatccttatttttttcagaggtatgaagggtgtgctgcgccttacagggcgtggttttctccggcgactgacgacgcgtccgacggcgcgcggcgtccggcatcaaggtcggcgcggatctgttcatactggtcgtcgaggcgatagaagcggccaatccacagcattgaggcgacaatcagcagcgccgggatatagaggtagcaggcttttatcgccagcatcgcgccgtcgctttgggcctggttggcgatatagccgccggatgagagcagtaccccggtaatagcgcccgcgcccgccatagccaccttgccaagaaagccgttgatagaggtcaaaatgccggcggtattgatgccggttttccacaccccgtaatccaccggatcggcctgcatggagaagtaaattgccgtgcgctgtccggcgccaagcgatagcaccaccgcaccggcaaccaggccccagctgttaacgcctgccgccatcatcatgcccatgccgaccaggttgatcgcgctggcgaccagataaacgtggcgctttttcatccggctggcgagcagcggcacggtgagggtacccagcagaggaacgaaggtggagatcccggcgacgatcgccgtgagatcgttattgccgacgtaataatggaaaaagtagaccagcgccccggtctggaagaaaaacgcgccccacatcaggaaaatattgatggcgaagacgaaccacggccggttggcgcgcaggctgacccaggcgcgttttaaggtcatgcgctcctgcgtaatgctgatattttccttaacgttccggaagctcaccagcaggaagaaggtggcaataacgccgaaaaccaccgccgtgtagaagaagccgtgctgctgattgcctttccccagcgcgccaaccagcggcagagtggcgaccgcgacgatggtcgcgccgagcgagccgagcagaatacgcaccgccgacagcgtggtgcgttcccgcgagtcgttcgtcagaaacggcagcatggcgcagaacggaatgttgacgatggtatagagaaacgacaggcacagataggtgacaaaagcgtagatcagcttaccggtggtgccgaaatccggcacgtagaaggccagaatacacagcaatccgaaggggatcgcgccaataagcagatacggacgacagcgtccccagcgggtggcggtattgtcgataaccagccccatcagcacgtcggcaacgccgtccaccagacgcgtcacgagaaacatcaggccaacgtaataggcgggcaggcccatcacgtcggtgtaaaagaacatcagataaagagagatcatctgccacacgaggttgcaggagaggtcggcgatgccatagccaaggcgctgccgccacagggtaaaggttgtttctgccataaaaatacactcgcttatcgttgttgttaaagtccgtactggcgaataaaccaggccggggtgcagctccacgcatggcaataactgtttatcagtttgctgccataaggggaaaaatcaggatgcgccgggtcgaagatttcccagaaggtatcggcgccgtagtcgaccatggctccccagtaggctttgatctgcgcaattgcctcgtcgcgcagcccgcactgcagaagggcggcgatatagtgatgacgcagatagggtgtgttcatggcgaccgcggggggatttttctccaggttgcgcatgatctcccggcgctgctgcggcgtgccgacttccgccagcaccagccagatttgcgatgcccaggagacctgccgccgggcgccgctgacgtaaaagccctgctgcgggtcccataacgcatcgagggccgccgatttgagctgctgtaaacgctggcgatagctgacggccagctcaggttcaaaacgctccgccagccagatagcgcgctgcaggcagtaaatcagtaccccctgcgccgccgcctgtttattcagcgacgcctgccagtcgataaacacccaccagtcgtcgctatcgcgcacaacgccggaggcgtcgcagcgggtcagcgccagttctacctgacgacgcgccgtgggccacagctcgcgggccgtggccatatcctccgcgctttgcagatagttgtagaggacgtcgacaaaaaacaatgaataatcaaaaagaaaggtatcgtccgcaatgacatccggctgcacgaacacgttggccgataccatgccgtcctcgcgagtatgcccggcaaaaaggtacaggcagcggcgcaccagatcgtggcgtgcgaaggtgacatcgttgaccagcgcctgcagacgtaaatcgccgagccacaggcggcggtcgcgtttggggccatcttcaaacacttcctgcatgcagttttgcagggtcagcacggcaacgttatcaatggcccggagctgcgggtcggaggttgtcgccgccgggcatgcgccgctggccgaggtgaccgcgttaacctcaatctgggtgaactgcaggcgaaacttgcgcgaaacggctttgacctccaccttcagatagcggaagcagtagcggcgcggcaggtcaatttcggcgggcaggacatcaagccacagatcctgctgctgcagccagctactgctgagccagccctgatagtcgctgaacggttcgcacacttcgctcagcgtttcgccgaaggtcaactgcagatgggccggagcgtccggcggactcccggcgctctggcagagaaaatgcaggtagccaacgtagtggctgccaaaatcaataatgacgctatcgccgctgctcagctcgcgctggtaaaacgcggccagggtgctcaccggctcggcgcgccagccgaagagcgccgcggcgtcggcgtgggcttcgactaccgcgatcggcgggtgtgcctgacgactcagcgcgggccggagcgcctcggcggtacgtaaaaaattcgggtggcgggtcatcatgacctgagaattatgctgaattgcctgtgacatactgcgtcctctgtgttgatttgtccgcagcataagacgccgccgcccgcggcaaccactctggcaatgccaatgcatctggcaaaatggcactgataatgagatgagcgggtcgccgatcacaattccataaatcttgctcgtggcggccggttaaatgcattatcttgcccctgcgccgtatgccgttttggacccgatcgatgatgctaaccgttgagtattatttcacccatccgcaggataagctgggaatgtacgccagcgatccggaagataatagccatgaacatagtcacgagtttgctgaactggtgatcgttgaagaagggcacggcttacacgttattaatggccggccattatatattcagcagggcgacgttttttacgttcagccgggagatgttcactattatgatgagctgggaacgcttaagttaattaacgtattaattaacccactggtagaatttcattatttacagcctctcgacaccttattgcagacgttctccgcacgaaaggcttcctgctacggctggctggcgccggatacccgccatatctgcaaggaattggtagataaaatattttctgccgagctgcggcgggggcaaaatattgccctgcgcgaagccgcctttttccagctggtgacgacgattctgcatgcggaaaccgaagccgaatatagcaccaccaaatataagctgcataaattgctgacctggctacaggagcactgttttgaagaacataactggccgcagctggcggagaaattccacctgaccacgcggaccgcttttcgccatattaaagaggcgacgggattgacgccggataattatttaaagcgtctgcgcttagtttcggcgcgcgtcaaattacgcgagaccgatatgacgattaccgaagtggcttatttatgcggttttgccaacagcaaccactttaccaccttatataaaaaggtctttggcctgacgcccagcgaagatcggcggcgtttgctgcgctagttcacctcccggaggcgatgctgcgcatctgtccgggctacgcgccctcagcggtctgcggtccggtagcccgggcaaggcgctgtgcgccgcccccgggagagacgcgcagggtggtgaagaattgccccggaggcgagcgggggctatttttccggggtattggcgcggacgtggcggccgctggcaacaaagttgccggtgccgagatgatggagggtattgatcttatcgtcgtcgaactgccagcgtccgctgacgaacgcgcgctcatcggcggcggcggaaaccacttcgccaaacagcgtatcgtactgctcctgagccgccgttgccggcagcagtcggcactccatccatgcaagacacttctcttcaatcagcggcaagcccagctccggaccttgcacgaccgggatgccgtaagcgttaaatttatcctcatcgcgtccgctgatgctgccgaccgcgtaggtccaactggcggcctcgacgccgggaacgacgatgccaaatgcgccgttgcgctcaataatttcccgcgtccaggcgcttttatctaccacgatggccagcctcggcggagcgaactccaccggcatcgaccacgcggcggccatgacgttgcggcgttgagagtgggcgtcatagctggttatcaaaattgttgggccatggttgagcaggcgactggcgtactgaagttccacgtggcgaaaacggctcatatgcgttccttggtaaatgggtctgatgccagacaacacgttaatccgcaatgaaaatgtaatcaatacgtcatcgagggtccctatagtcggcgtcactaagtcccaaagaggataacaatatgttagctcccctgaatttgtctcaggtgagcgcgcgccggcggatgttgaccgcgggcagagtctcgctttcccaacgggagggcgataatgcgcgcgcttaccagcattaaactcgacggcgtttctttcgccttcggcgctcacaccgtgcttaatcagatcgatctgcatatcgatgcgggcagcattgttgcgctgctggggccttctggctgcggtaaaagcacgctgctgcgtctgctcgccggattaaccgtacccgccagcggcagcattcactttggcgatcgcctggtggcgaaaaccggctggggcttgccgccggagcagcgcgatctcggtatggtctttcaggattacgccctgtggccgcacatgacggcggcgcagaacgtggctttcccgctgcgtatgcgcggcgtcgggcgtcagcagcgacagcaacgggtcgaggaggcgctggcgatggttggtctcagcggcttcgccgaccgcaaaccgtcgggcctttccggcggtcagcagcagcgcgttgcgctggcccgcgccatcgtcgcagaaccgcgcgtgctgctgttcgatgagccgctctccaatctcgacagcgagctgcgcgagtcgctgtgcctcgaaatgagcggcctgctgcgccagctgggcatcactgccgtctacgtcacccacgaccgtcgcgaagccgagctgctggccgacaagattattcatttatctgcgggctgcattgccgccgtccgcgccgtgacttcaacctcaggggaatccgtatgaaaaccgttatcaccgttaccaaaggagccgcgctcgcgatgatgttgtccgccaccacgatctccagcgcccaggcgctcaccgtctacaccgccgggccgggctcgctggcgaaaaaccttgccagcggctatgagaagaaaaccggcgttaaggtgaatattttccaggccaccaccggtaaggtgatggcgcgtctcgaggccgagcaggctaacccgcaggcggatgtgctgatttccgcctcgtgggatacggcggaagatttgcatcaccgcggctggctgctgccgtatcagagcgccaatgccgataaagtcccggcgaacctgaaatccgccgattacgttgctcagggtatttcggccctggggatcgtctggaataccaaaagcggcaccccggagccgaaagagtggcgcgacctgaccgaagcggcgttcaaagacaaagtgacgacgccggacccggcactttccggcgcgtcgctggatttgctgatcgggttacagaatggcatgggcgataaagcctgggcgctgtttgatgcgttaaagaagaatggcatggtggtcagcgggccgaacgcccaggcggtaacgccggtgatgcagggggcgaaagcggcggtattcggcgcggttgattatgtctcttacggcaatatccatcagggcgaatcgctaaaggtgattttcccggccagcggcacggtcattgcaccgcggccgatgatgatcctcaaaaccagccagcatgctgacgacgcaaaagccttcgttgattatgtgctgtcgccggaaggccaggcgctggtcgccgacgcctggcttatgcccgcccgcagcgatgttccggcgaagcgcccgctgctcaacgagctgaaaatattgccgaccgcaggcgagggcaatagcgaacgtagcgcggtgctttcccgctttaatacgcttttcgcccagtaaaccgacttttcccccgggcttcgaaagttggctcgggcacattcccggaggcggcgctggcgcgcctgtcggggctaccggaccgcagacggctgtgaccccgtagcccggctaagcgtagcgcgagccgggtaagatcgtatccaggaaaataccgtgaaacagagacttatttcagcgggtacgctggcggcgctgctggtgctggtggcattgccgctgctgtttattgtcctccaggcaatttttccccagtttagcgccggttcgctgggcggcgcgtttagcggcgtatcaacgctgattgccgacccgcagctgccgacgatgctcggcggtaccctgtgggtggcctgcggcgtggcgctgatgagcatggtcatcggtctaccgctgggcgtcttgcgcggattgtttactatcccgctgccgcggctgtgggatctgctctttctgatcccgtttctgacgccgccctatattgccgcgctgtcgtggatgctgatgctgcaaagtcatggctatctccagcagctgaccggctgggatctcaacgatctgttttttagccgcatcgggatcgtgctggtgatgaccctcaatatctttccggtggtctacttcgccgtctcgcgcagcctgttggccagcggtcagcggctggcgattgtcgcccgggtgcacggcgccagcgcctggcgagcgttctggcacatcacgctgccgatgctttctccggctctggcggcggggatgctgctggcgtttaccctggccattgaagagtacggcgttccggcggccctgggggcgcgggcagggctggtcatgctgaccgtaggcattgagaaaaagctcgccgactggcctgtcgatctgcccggcgcgtcgctgctttcgctgctgctgatcgcggtggcgctgctggcctggtggctgcaaaaacggctgaccggcgataaagaggtcaccagcgtcaccggcaagccgggagagaatagcggggcggagttgggctggctgacgcttccggcggtgctagtgatggcgggcgtcggggggctggcggtggtgatgccgggcgcgtcgatggtgctgaccagcctgatgagcacgctgtcgggcggtatccacgctgacaatgttacccttcgtcattttgccgcgctgtttgctcagcagggcgacgcgctgtcggcactggcaaccagcctttcgctggcgctggcttcggcaggggttgtcggcctggtggggctgctcgccgcctggctggttgtggtgcaaaaaatcaaggggagcgcctttgttgatgcgctatcgctgctgccggcggcgctgccgggcgtggtggtgggcgtcgggctgattctgctgtggaaccagccgttctggccggtgtccccctacaacacctggtttatgctgctgctttcctactgctgtctgctgctgccctggccggtgcgctacgtcagcagcgcgctgcgtcagcttggcaataatctcgaacccgcggcgcgggtgcacggcgcaacggccctgcaggcgctgcgtctgatcgttctgccgctggtctttccggcgctgctggcggcgatgctgatggtgttcgccgttgcctcccgcgagctggtgacctcgttgctgcttgcgccggccgggacgcaaaccgtctcggtgtttatctggcgccagtttgagcagggctcggcgggagagggaatggcaatggcatcgctgacgctctttaccggtctggggctgatgctctgcgcgctggcgctgatgcagcggggcacgcgcggataaatacgatcgcacaaaatagctggtcaggcgggaaaaacaggctataaatgtcggacaccgattgctggaggcattgatgagtccctttttaagcgcctatttttctcgtctgggctggacgggcaccccggatgtttcacttcacaccctgcgcgaactgcatattcaccataacggcgcgatcccctttgaaaatctggatgtgctgctgcccagagagatacatctcgacgatcgcaccctcgaagagaagctgattcacggtcgtcgcggcggctactgcttcgagcaaaacggcctgctggaaagagcgctgcgcgagatcggctttaccgtgcgcagccttctggggcgcgtggtgctggccaatcctccgcatatgccgccgcgtacccatcggctgctgctggtggaggtggagggagaacgctggattgccgacgttggtttcggcggccagaccttgaccgcgccgattaagctgctggcggatatagaacaatccaccccgcacggcgaatatcgcctgatttacgaaggggaagagtgggcgctgcagttcagccatcacggccactggcagtcgatgtaccattttgatttaggtcgccagtacgcttccgactatgtgatgggcaacttctggtcggcgcactggccgcagtcgcacttccgccatcatctgctgatgtgccgccacttgccggacggcggcaaaatgacgctgaccaatttccactttacccattgggataaaaaccacgtagtcgaaaagctcgatttagcggacgttccggcgctgtatgaggcgctgcaaacgcgttttggcctcggcgtggatgatgccaaatacggctttagcgaagcggagctggcggcggtgatggcggcgtttgatacccatcccgaggccggaaaataaatatcgtacaggaaccgttggctggataaggggtgactgtcaaacggggatgttacccggcttgcgctacgcttagccgggctacggggcgctcctgtcgcccggggttaggcgtttttgccgcgacccgggatgattacggattttgctcagcgtcttgaacgtaccacctggtagcggcgggtgaaatattcaaacggcgcgctccacacgtgaaccagccgggtgaacgggaacagcaggaaaatcgtcatccccagcaccagatgcacgcggaaaacaaaggccacgccgctgagcatttctgacgagccgccgcggaaggtgacgatgccctgcgcccagcccaccagcttcatcatttcactgccgtccggatactgcgccgagaaagggatggtgctcagcccgagcaggcactgaatcagcagaatgctcatgatgatgatgtccggcgcggtcgaggtggcgcgaacgcgctggttggtcagacgacgccagagcaaaccggcgccgccaatcagcgtcaggacgccgcagacgccgccgagcaccatcgccatctgctgcttgaccgcaatgggtaaaaaccaggcatacatccagtgcggcgttaacatgccgaacagatggccaaagaaaatgccgagtatgccgatatggaacagattcgaccagatcaccatcccgcgtttatccagcatctggctggaggaggcgcgccaggtgtactggccgtagtcatagcgcagccagctgccgagaaaaaagaccgtcgcgcagatgtaggggtagatgtcgtaaaaaaaagacgttcagatactgtatcatttcgggcctcccgcgctgacgtcgacgtactgcggcgccacgtcctggctaaagcgtcgttgatattgctgtaacggtgagctgtcacaggccgtggcgttgtcttcgataaatttcacctgttcttcttcccagaccgcatccagcgcctgccgggtgtcatcgcgggactcgttgttgacctgctgcgtgacactgtcacttgatagcgggatcccgccgaggctgagcagggcgtcaaacagctgataccaggggacaccgcgctgcttcagccgcccgcccagcagcgccagaatcggcgcgacgttttgcagaccttcgcgcgcttcgttttccggcaggatgctgaggtattccagatacagcggcaggtggtcgggaagctcgcgacagttgagcaccaggcccgccttttcatactgagcgagcaggtcgaccatcgcctgaccgcggtcgcgagactcggcgtgcacgtgttcaaacagcagtagcgacgtggcgcggccccggtcgaacacttcgcaccattcggcctgcttgtccagcagcggggcattcagcatctcagcggcgaagtcgttgagcacaggggcgtcgtgacgcaccatgctcagcacctcgtccttgcactgccaaagaaactcatccgggtactccatcagcaggccgatcgctttgaggatttgcattattcgccctccgctttatcgcgtacttcggtgatgttgatggcgtcaatgcggctactgttgaacaggttgaatttggtgtcggagccgtggcagccgtcgccgaaggtaaagccgcagccgttgcgctcggggaaggcgtcgcgcgccatttcgcggtggctggtcgggatcacgaagcggtcctcgtagttggcgatcgccagataacggtacatctcctcgacctgttcaacgctcaggcccacctcctcgatggcgcgagtatcggtgacgccttccaccgtttgcgagcgcatgtagtgacgcatcgccatcatgcgcttcagcgcgcgcagtaccgggccggtatcgcccgcgctgagcatattggcgagatactgcaccggaatgcgcaggctttcgatggccggaagcacgctgtcgcttttcggcagaccgccggcgtcggcgtaggactgaatcggcgacagcggcggcacgtaccagaccattggcagggtgcggtattccggatgcagcggcagcgccagcttccagtccatcgccattttgtacaccggcgagcgctgggcggcatcaatcacgttttgcggaatcccctgtttcagcgcttcttcaatcaccgccgggtcgtgggggttgaggaacacctcgcactgccgctcgtagaggtcggtttcgcgctcggtgctggcggcctcttcaatgcggtcggcgtcgtacaacagcacgccgaggtagcggatacgtcccacgcaggtttcggaacagacggtgggctgtccggactcgatacgcgggtagcagaagatgcacttctccgatttgccgcttttccagttgaagtagattttcttgtacgggcagccgctgatgcacagacgccagccgcggcatttgtcctggtcgatcagcacgatgccgtcttcttcacgcttgtagatggcgccgctggggcaggtggcgacgcagctcgggttcaggcagtgctcgcacaggcgcggcagatacatcatgaaggtattttcaaactggccgtacatctccttctgaatcttgtcgaagttacggtcgcgggcgcgcttttcaaactcgccgccgagcagctcttcccagttggggccccagataattttatccatccgcttgccgtcgataagcgaacgcggacgggcggtgggcaggtgttttccctccggcgcgttgtgcagatgctggtaatcaaaggtaaagggttcatagtagtcgtcgatctgcggtatcaccggattggcgaaaattttggtgatgacgcccattttgccgcccagacgcgggcgtattttgccattaacatcgcgcacccagccgccttcccacacctcctgatcttcccagtttttcggatagccgatgcccggtttggtttcgacgttgttaaaccaggcgtattccatcccttcgcgtccggtccagacgtttttacaggtgacggaacaggtgtgacagccgatgcatttatcgagattgagaaccataccgacctgtgaacgtattttcattttttcgcctcctgtaccccatcgcgaccttcgtcatccagccagtcaatatttttcattttgcggatcatgatgaactcgtcgcggttggagccgacggtgccgtagtagttgaaaccgtaagccaactgggcgtagccgccaatcatatgggtcggtttcgggcacacgcgggtgaccgagttatggatcccgccgcgccgtccggtgacttccgagcccggaatattcatcaggcgctcctgcgcgtggtacatcatggtcatccccggcggtacgcgctggctgaccaccgcgcgggcggtgagcgcgccgttggcgttgaaggcctcgatccagtcgttatcttcaatacccagctcgcgagcgtcggtttcgctgatccacacgatcggcccgccgcgcgacagggtcagcatcagcaggttttcgctgtaggtggagtggatgccccatttctggtgcggcgtcaggaaattgagcgctttttccgggaagccgttaggcggaatcgctttcatctggctgacgctgcgggtgtcaatgggcggacgataaaccaccaggctttcgccaaaggcgcgcatccaggggtgatcctgatacagctgctggcggccggaaagggtgcgccaggggatcagctcgtggacgttggtatagccggcgttgtaggaaacatgctcgctctcgaggccggaccaggtcgggctggagataattttgcgcggctgggcctgaatatcgcggaagcgaattttttcatcctctttattcagcgccaggtgcgtatgctcgcggccggtaaactcgccgagcgcttgccaggctttgaccgccacctggccgttggtttccggggcgagggcgaggatcacttccgaggcgtcaatggcgctgtcgatgcgcgggcgacctttggccgggccatcaagcttgacgtagttaagcttgccgaggaagtcgacctcgttctgggtgttccaggtgatgcctttaccgccgttgcccagtttgtcgagcagcggcccgagggaggtaaagcgctcatacgtcgccggataatcgcgctcaacgacggcaatcgacggcgcggttttacccggcgtcagctcgcattcccctttccgccagtccagcacgtcgaagggctgcgacagctccgccggggagtcgtgctgcagcggcaccagcacaacgtcggtctctttatcgaggtggccgacgcagacctcggagaaggttttggcgatatctttgtaaatttcccagtcgcttttcgcctcccacgccgggtcaacggcggcggagagcgggtggataaacggatgcatatccgaggtgttcatatcgtctttttcataccaggtggcggtcggcagaacgatatcggagaacaggcaggtactggacatgcggaaatcgagcgtcaccagcaggtcgagcttgccttcgatggccgcggtctgccactccacctcttcgggcttcacgtcatcgctggcgcccagctcatcgccctgaataccgctgtcggtgcccagcagatatttgagcatatactcgtggcccttgccggaggagcccagcaggttggagcgccagataaacagattacgtggatgatttttgccgttatccggctgttcgcaggcgaagcggatctcgccggacttcagcgcccgggcggtgtagtcggcgggggtcagtccggccgcggcggcctgcgccttgatggtcagcggattgacgcccagctgcggcgcggagggcagccagcccatgcgctcggcgcgtacgttaaagtcgatcagatggccgctgaattggctggcatcggccagcggcgacagcagctcccgggcggtcagcttttcatagcgccactggctggcgtgattgtaaaaaaaggaggtgctgttcatctggcgcggcggacgattccagtcaagggcgaacgccagcggcagccagccggtttgcggacgcagcttctcctgaccgacatagtgcgaccagccgccgccgctctggccgacgcagccgcagaataccagcatattgatcatcccccggtagttcatatccatgtggtaccagtggttgacgccggcgccgaggataatcatcgaccgtccgtgggttttatgcgcggtatcggcgaattcacgggcgatctgctcgatgtgctggcgcgggacgccggtaatctgttcggcccacgccggggtataggctttcatctcgctgaagtcctgcgcggcgttgggatcgtctaaaccgcgatcgagtccgtagttggcgagaatcagatcgtagacgctaaccaccaggccggattcaccgttggccagcgggagctgcttaaccggcagctgatgcagcgtcaccggatcctgcttgatgctgcgaaagtgcgggttttcgttgccgccgaagtagggaaagcccaccgtcaccacgtcgtcacggctatccagcagcgatagtttgagttcaatggcttgcccggcggcctgctgttcaaggttccatttgcctttctctccccagcggaagccaatcgaaccgttgggcgccaccagttcaccagcgctgttataggcgacggttttccactccgggttattgctttcgcccagcccgtcaaccagatcggcggcgcggaccatcctgccgggaacgtagaaaccctcctcgcgacgctcaagcatcaccagcatcggcatatcggtgtaggtgcggcagtagttgaggaaataatcgctcgggttatcaaggtgaaacgttttgaggatcgcgtggcccatcgccatggccagcgcgctgtcggtaccctgtttcggcgccagccactggtcgctgagcttggctacctccgaaaagtccggggtaatcgcgatggttttggtgcccttgtagcgcacttccgtaaagaagtgggcgtccggggttcgggtctgcgggacgttggagccccaggcgataatatagctggagttgtaccagtcggcggactcgggaacgtcggtctgctcgccccaggtcattggcgaggcggggggaaggtcgcagtaccagtcgtagaagctcaggcaggtgccgccgagcagcgacagataccgggtgccggcggcgtaagagaccatcgacatcgccgggatcggcgaaaagcccgccacgcggtccgggccgtagtttttgatggtccagacgttggcggcggcaatcagctggttcagctccttccagcttgaacggataaacccgcctttgccgcgtacctgcttgtagctgagggttttgaccgggtcctgcatgatgctgtcccacgcctgcaccgggtccgggtgctgagccagcgcttcgcgccatagcgcaatcagccgcttgcgcgccagcggatacttcaggcggttagcgctgtagaggtaccaggagtagcttgcgccgcgcgggcagccgcggggttcgtggttgggcaggtccgggcgggtgcgggggtagtccgtttgctgagtttcccaggtgaccagcccgtttttgacgtaaattttccagctgcaggagcctgtgcagttcacgccgtgcgttgagcggacgattttgtcgaactgccagcgctgacggtagctgtcttcccagtcgcggttggtgttgtacacctgaccgtggccgttggcaaagctctcgcctttctgcttaaagtagcgaaagcgatccagtagtttactcatgaccttcctcctgctccgataatgtccggcctgaaaagaccgtacgatccccaggccggatagggcgtcagccgccatccgatgaatatgccgttattgttttgccggtttacgacggccgtagaccagccaggtcaccagcacgcaaaccacgtagaaaaccaggaagaccttcatcgccccgaccggggagccggtcatcgccagcgaggtaccgaaggctttagggataaagaaaccaccaatcgcgccgatggcggagataaagccgagcgccgccgcggtgtcggtcaccgcttcgtgctgggcctgttcgtcgctgccgccgcgtttcttcacgctgtcgagggtgatttggcgaaagatcacggcgatcatctggaaggtggaaccgctgccgagaccggcggtcaggaacagccccataaacaccacgtaaaaggcgagaaaactgcctgagccgctgccggggagggtgagaaacagcaggccggtgaacagcgccatcagcacaaagttcaccagcgtgacccgtacgccgccgagacggtcggatataatcccgccgaaagaacgcgccagcgcgccgataaacggcccgaagaaggccagcttaaggatgttaacatcagggaactgcgttttcgccagcatggcgaaaccggcggagaagccgataaacgagccaaaggtggccaaatagagtaggctcagcagccacatatgcgggcgtttcagcaccggcagctgctcgcgaatcgaagcctttgagctggcgatgtcgttcattcctacccaggcggcgaaggtggctatcaccagcagcggaacccagacgagggcggcgttgctcagcgcgagaagagagccatcctcctgaggcacgccatggatgccaagaaaagcgaagatgggaagataaatcgccgccggcgcgatcatctgcatcacgctgacgccgagattgccgaggccgccgttgatacccagcgcgctgccctgtttcgctttgggaaagaaaaaactgatatttcccatgctggaagcaaagttcgcgccggcaaaaccgcacagcagggcaatggtgataaatacccagaatggagtagcggagttttgaatggcgacacccagccagatacagggcaccaccagaataatcgtgcttaataccgtccagtagcgcccgccaaatataggtaccataaaggagtaggggacgcgtaatattgcgccggaaagcgagggcagagcggttaataaaaagagctgatcggtggtgaaattaaatccgactttattgagattgacggcgacggcgctgaatagcatccagacgcaaaaggcgagtagcaaacaacctacggaaatgcaaagatttctgcgcgctatttgctttcccttattctcccaaaacgccgcattttctggtttccactcttttaaaagataatgattctttttctcatttttgctcagcatattgccctcgaatgaacagtaacccgtcaaaaaagaataaactggtaaaacagcaaattaataaaagaaataaaatcagggatggggatgtatctgttgtaataaatgaagaatagataagaaaagcgcgccgaaagaggacgcgcgaatattagctcaggattatttgttactaaatgtaacttaaaattaaaaaagttccatcgagatagaataattgatatgccgattgaaggcggcatcatctatttcctgcattcccagcgcataaataccgtcgaggccgcagacgagagcaatgagccgccaggcaatgctttccatatcgtcccctggcttaaactcaccggcagcggttccctggcggatgatcttcagggtctcttcatgccacatgttcatggtgagcagataggcccctttgatatcgctgtcgctatcggccagcagctgcgcttcgcgccacaggcgaatgtatggctcaagcctgccgtcgtcgctgcccaccatagaaaacaggcgttcacgccacgtggcgtcgtcggcgaccagcggcatatccatcatttcgcggatcaaccgtatgaaggcatgggcttttagctcgcccgcggaggtgaaatgatggtgcagctgaccggcggagacgccggcttcggcggcaatctggcggacggtcatagcgctaaacccgccccgaagcgctacgcgcatggctgccagcacaataacttcccgacgcgcatcgcgatttaagtagcccataacgttagtgaccccggtttttttggcgatagtaacaaaaagttggacactcgttcaacaatccggcaggatccgttttctggacgcttgtccagttttaacgttgagggaaagtagtatgtctcggcaatggttgacgctgatggcgattttgctggtttatattccggtggcgattgacgccactgttctccacgtggctgcgccaacgctcagcgtagcgctggggaccagcggtaacgagctgctgtggattattgatatttattcgctggtaatggccggtatggtgctgcctatgggcgcattgggcgataaaatcggctttaaacggctgctgctgctcggcagcggtatttttggcaccgcgtcgctggcggcggcgttttcgcccacggcagagacgctgattgcctcccgcgcgctgctggcggtgggggcggcgatgattgtgcctgcgaccctggccgggatccgcagcaccttttcgcaggcgcatcagcgtaatatggcgcttggtctgtgggcagcggtcggttccggcggcgcggcgttcggtccgctggttggcggcatgctgctggagcatttttactggggatcggttttcctgatcaacgtgccgatcgtcctgctggtgatagcgattaacgccaaagtggtgccgcgtcagcccgcgcggcgcgagcagccgctgaatcttttccaggcgctaatcctgatcgccgccattttgatgctggtctttagcgccaaaacggcgctcaaagggcaaatggcgctgtggttaaccgggctggtggcactatctggcgccgcgatgctgttctggttcgtgcgcaaacagctctcggcatcgcgtcccatggtcgatatgcgcctgtttacccatcgcattattttaagcggcgtgatgatggcgatgaccgcgctgattacgctggtgggttttgaactgctgatggcgcaggagctgcagtttgtgcacagcaaaacgccttttgaagccgggctgtttatgctgccggtgatggtggcgagcggtttcagcgggcccattgccggcatgctggtatcgcggctggggctgcgcgaggtcgccaccggcggaatgctgctcagcgccctgagcttcctcggcctgtcgatgaccgatttcagtactcagcagtggcaggcctggggactgatgacgctgctgggcttcagcgtcgccagcgcgctgttggcctccagctcggcgatcatggccgccgcgccgaaggaaaaagcggcggcggcaggggccatcgaaaccatggcctatgagctgggcgcgggactggggattgccctgtttggcctgatcctgacccgcagctacacctcgtcaattgttctgccgggtggaatcgagggcgcggcggcggagcaggcgtcgtcctccatcagcgaggcgattaagctggcgcagtcgctgcccgccataccggcgcaaagcctgcttgaagcggcgaaggcagcgtttattcattcgcacagcatcgtgctggcgacggctggcgtcctgcttctgctgctggcggccggcatctggcgtagtctggcaaaagcgcctgagctgaattaaccctttagacagccgactgccagatgattgaagacgtgcccatcccgggaattgccatcagggatgggctgaagtcagtcacggatcttgtaggccgttaaggcgtcggccgccgccgttttagcgccgggtcgcctgccagcaaagcagggagccggcgcacaccattccggcgccctgccagaatgaccacgacagcgcggcgctgagcagtgccgccgccagcgccgaggagagcaccggcgtaaagtaggaggcggcggccagcaggctgacgttgccgtgcaggatcccgacgttccacgccgcgtagcctaatcccagggcaacggacagcgcgatcagtttggctatcaccggccagctaaagaccatgggcggctgttcgctgaacaggaactttagccacagggtcagggcggtaagcagaacaaaaagggtaatcccgtttttgcccttcgcgtatttagcggtgaccgtgcagtaggccgcccagataaacgcgccgatgaacgccagaatatagctcagcgggctggaaaccacgttgcgggtaatttcatctacattcagaccatgctcaccgcctaatacccaggtgacgccgaataaagcgagaaataatcccggaataaccaaccagctgcttttttggccgttaaacagaatggcgaataaaatcgtcaggctgggccacagataattaaccatgcccacttcaatagcctgctggcggctaccggctaatccgaccgacagcgccaggcaaatttcatagctgacgaacagcaggctccctgccagtaaataggggcgagggatctggcgtatttgcgggaagccgacggtaaagatcagcaaaaggccgctcaggctgtagatcatcgccgcgccgcccaccggaccaagcccttcgcttacgccacgaatcagcccgaccatggtgctccacaagacgatagcggccaatccaatgagcgtggctctcttcttctccatatttaacctgatgttggttcaaacgcagtcgggttttataacacttttttttcgcttccgggggatattttccaccgtgcttaatcctaatggagtaacgaaattcaacgcggctgactattaaggggtcatgggttcaggacattgatttgacgcaaataaaacagggttattgctgttaatttccactcccgcaatgaataaacatcccgcatggaggggaacaatggacgtcagccgcagaaagttttttaaaatctgcgcaggcggtatggccggaacaacagccgctgcattgggttttgcgcccaaaatggccctggctcaggcgcgtaattacaaattgctgcgcgccaaagagatccgcaacacctgcacatactgctccgtgggctgcgggctattaatgtatagcctgggcgacggcgcgaaaaacgcgaaagaagcgatttaccacattgaaggtgacccggatcatccggtgagccgcggcgcgctgtgcccgaaaggcgcggggctgcttgactatgttcatagcgacaaccgcctgcgctatccgcagtaccgcgcgccgggttcggatacatggcagcgcatctcctgggatgacgcgtttacccgcatcgccaaactgatgaaagccgaccgcgacgccaattttattgaaaagaacgaacagggcgtgacggttaaccgctggctgtccaccgggatgttatgtgcctctgcggccagtaatgaaaccggcatgctgacgcaaaaatttgtgcgctccctcggcatgctggcggtagacaaccaggcgcgcgtctgacacggaccaacggtagcaagtcttgctccaacatttggtcgcggtgcgatgaccaaccactgggttgatatcaaaaacgctaacgtcgtggtggtgatgggcggtaacgccgccgaagcccatccggtgggattccgctgggcgatggaggcgaaaaacaacaacgatgcgacgctgattgtcgtcgacccgcgctttacgcgcacggcgtcggtggccgatatctatgcgcctattcgctccggcacggacattacgttcctgtcgggcgtgctgctgtacctgatcgaaaataacaaaatcaatgccgagtacgttaaacactacaccaacgccaacctgctggtgcgcgacgattttgccttcgaagatggcctgttcagcggctacgatgccgaaaagcgtcagtacgataaatcgtcgtggaactatcagttcgacgaaaacggctacgccatgcgcgacgagacgctgcagcatccgcgctgcgtctggaacctgctgaagcagcacgtttcgcgctatacgccggaggtggtggagaatatctgcggtacgccaaaggcggacttcctcaaagtgtgcgaagtgctggcgtcaaccagcgcggcggaccgaaccaccaccttcctttacgcgctgggctggacgcagcataccgtcggggcgcagaacatccgtaccatggcgatgattcagctgctgctcggcaatatggggatggcgggcggcggcgtcaacgcgctgcgcgggcactccaatattcaggggctaaccgatttaggcctgctctcgaccagcctgccgggctacctgacgctgccgtcggaacagcagacggatctgcaaagctatctcgccgccaatacgccgaaggcgacgctggccgaacaggtgaactactggagcaactatccgaagttcttcgtcagcctgatgaaatcgttctacggcgacgcggcgcaaaaagagaacgactggggcttccactggctgccgaaatgggaccaggcttacgacgttatcaaatatttcaatatgatggataacggtaacgtcacgggctatatctgccagggcttcaatccggtggcttcgttcccggacaaaaacaaggtggtccgcagcctgagcaagctgaagtacatggtggttatcgacccgctggtgaccgaaacgtcgaccttctggcaaaaccacggcgagtcgaacgatgttgacccggcggcgattcagaccgaagtgttccgcctgccgtccacctgcttcgccgaagaggatggttcaatcgccaactccgggcgctggctgcagtggcactggaaaggccaggacgcgccgggcgaagcgcgcaacgacggcgaaattctggccggcatttaccaccgtctgcgcgagctgtatcgcaccgagggcggcaaaggcgtcgagccgctgctgaagatggggtggcactacaagcagccggatcgtccggaatcagaagaggtcgcgaaagagaacaacggctacgcgctggcggatctcttcgacgctaacggcgcgccgctggcgaagaagggccagctgttgaacagcttcgcgctgctgcgcgatgacggtaccaccgcgtcgtcctgctggatctataccggcagctggaccgagcagggcaaccagatggccaaccgcgataacgccgatccgtcaggcctcggcaacacgctcggctgggcatgggcgtggccgctcaaccggcgcgtgctgtacaaccgcgcgtcggcggatattaacggcaagccgtgggatgcgaagcggatgctgatccagtggaacggcagcaagtgggttggcaacgatattccggacttcaataccgcgccgccgggcagcaaaaccgggccgtttattatgcagccggaaggactggggcgcctgtttgccctgaataagctggcggaaggtccgttcccggaacactacgagccgatggaaacgccgcttggcaccaacccgctgcacccgaacgtggtctccagcccggtggtgcgcctgtatgaagaggatgcccttcgtttaggtaagaaggataaattcccgtacgtcggcaccacctatcgcctgaccgagcattttcatacctggaccaagcatgcgctgctcaatgtgattgcgcagccggaacagtttgtcgaaatcagcgaaggtctggcgaaagcgaaggggattgccaacggcgatcgggtgacggtcagcagcaagcgcggctttattcgcgcggtagcggtggtgacgcgtcgtctgcaaacgctcaacgttaacggccagcaggtagaaaccgtcgggatcccgctgcactggggttttgaaggggtagcccgcaaaggttacatcgccaataccctgacgccaaacgtcggggattccaactcgcaaacgccggagtacaaggcgtttctggtcaacatcgagaaagcgtaaggagcgaatacatggcgatggaaacccaggacattatcaaacgctccgccaccaacccgatcacgcccgcgccgcgcgcgcgggattttaaagcggaagtggcgaagctgatcgatgtctcctcctgcgtaggctgtaaagcctgccaggtggcctgttccgagtggaacgatatccgcgatgaggttgggcactgcgtcggggtgtacgacaaccccgccgatctgagcgccaaatcctggacggtaatgcgctttagcgaaaccgaacagaacggcaagctggagtggctgatacgcaaagacggctgcatgcactgcgaggacccgggctgcctgaaggcgtgcccgtccgccggggcgattattcagtacgctaacggcatcgtcgactttcagcaggagaactgcatcggctgcggctactgcatcgccgggtgcccctttaacgtcccgcgcctcaataaagaggataaccgggtctataagtgcaccctgtgcgttgaccgggtcagcgtcggccaggaaccggcctgcgtgaaaacctgcccaaccggcgcgattcactgcggcagcaagaaagagatgctggaagtggccaacgagcgcgtggaaaagctgaagaaacgcggctatccccatgccggggtgtataacccgccgggcgtcggcggcacccacgtgatgtacgtgctgcatcatgcggaccagccggagctgtaccacaacctgccgaaagagccgcagatcgatacgtcgatcaacctgtggaaaggcgcgctgaagccgctctcggcggtcgggtttatcgccacctttgccgggctgatttatcactacatcgggattgggccgaataaagaagcggatgacgatgaggaggagcatgatgagtaaatcgaaaatgattgtgcgtacgaagtttattgaccgcgcctgtcactggacggtggtcatctgctttttcctggtggcgctatcggggatctcgtttttcttcccgacgctgcagtggctgaccgaaaccttcggtacgccgcagatggggcgaattctgcatccgttcttcggggtactgattttcgtggctctgatgtttatgtttgtgcgttttgtccatcacaatattcccgacaagcaggatatcccctggctaaagggcattattgaggtactgaaaggcaacgagcataaagtggcgcgggtagggaaatataacgcggggcagaaaatgatgttctggaccatcatgagcatgatttttgtgctgctggtgaccggcgtgattatctggcggccctggtttgcccactatttcccgattcaggttattcgctatagcctgctgattcacgcgacctcggcgattattcttattcatgcgattctgatccacatgtatatggcgttttgggtgaagggatcgattaaaggcatgatcgaagggaaggtgagtcgccgctgggcgaagaagcatcatccgcgctggtatcgcgaggtggagcgtcaggaagcgaagaaagagagctgtgaagggctgaagtaagcgtaactgagcaacccgctctggctgaagccggagcggatcggctattggtaacaagggcgtcaatggcggaaataacttcgcctctggcgctttttaagttacagataaaatcttcgcgcttgatcggcttattattaaggtttgtcatcatcggcgaacaaagcataaacgtttaaaattcaatatttacctcaggaactaaaggatgctgccatagtggcagatgaccattacgcatcaggggaataattaccctggtgggtaggtcttcataaaaatcattttgcacaatcataaaatagggtagagagtgcttcgtttgcgaagaagggttccgatacacgtcgaattgtttaagcatcagagcaccctgaagtattcatcttcggtgatggacccatgctcgtcgacgaattcattcattaaccggatcaactcgttactgggatgaattgactgactttcagctgtgggtatcgaggataaacggtgctttttgctcgttgatatcgcctgctggaagctatcatccgctgtgtactctttcattatcctgcctccgtgtggttaatgtcgccattatcaacctactacctaaaaaaacaatacagattgtcctggttaagtcgcatttgcgagacaggttccattgaaaagcaacggcatgaaatgatgaaatttttatggaaccgcggttgtgaattgttatcgctatgccgttgctggcgaccgggcagcggcggggcacgaaatggctttattggtttttttaatctgcaaataagcctatgaaataatcacgccgttttatggataaatatgccacccggcgtttttatctggtctgccgtttaataatgcacaataatgccggcggtatgttttataacaagtgattagttgtatgaaaaagactattttttcgttagcgcttggcacttttggtctcggaatggcggaatttggcatcatgggcgtattacctgaaattgcccatgacgtcgggatatctattcccgccgcgggcaatatgatctcctggtatgcgcttggcgtcgtcatcggcgcgccggtgatggcgctgttctccagccgcttttcgttaaaagcggtgatgctgttcctcgtggcgctgtgcgttatcggcaatgccatctttacgttatcttccagctattcgatgctggcgctggggcgcctgatctccggtttcccgcacggcgccttctttggcgtgggggcgatcgttctgtcgaaaattgcgccgccggggaaggtcaccgccgcggtggcgggaatgattgccggaatgacggtcgctaatttgctgggggttcccgccggaacctggcttggccatcagtttagctggcgctatacctttctggcgattgcggtgtttgacatcgccgtgctggtcgccatcgcctggtgggtgcccacgctgtttgataaaccgacgacgcgcttgcgctcgcagtttcattttttaacatcgcccgcaccgtggttaatttttgccgcgacgatgttcggcaatgccggcgtattcgcgtggtttagctatattaagccgtttatgattaacgtctctggttttggtgagagcgccatcatagccattatgctgctggcggggctggggatggttctggggaatttatttagcggtaaagtctccgtccgttatagcccgttacgcattgccgccgtgacggatggcgtgattgtcgtgaccttattacttctgttcctgctgggtgagaataaagccgccgcattaaccctcgcgtttatttgctgcgcggccctgtttgccctgtcggcaccgctgcaaattctgctgctgcaaaatgcgaagggcggcgagatgctgggcgcggcgggcggccagatcgcctttaatctcggcagcgccattggggcgctattcggcgggatgatgattacggccggtcctggctggcgtttcgttgccttaccggccgcgctgctttcgtttcttgcgctcagttcgctgctgatttatgcccgccatcagcggcgtctggcctgattaagcccgctggcagctattcctgccacggctcgccgagggtcagcattaaccggttggcccaggcaaagaaagccgccgattgcagtaaatccagttgggcgagggtatccagcccctgttgctcgacggcggcaaggtggtcaacggacagagcgggaggggtaacggaaatcgcggcggcgaaatcgatctgcgcctgccatcccggcgtctgcccgtcgcttaactgctctcccggcgtcaccgccagcagcgtctctatcgccgtttcatctttggccagctgtgccgctttgcgcgcatgcaccgaggcgcaataaatacagccgttgattttgcttgccactgtcgccgccagctcgcgctcggcgcgcggcaggccgccgggagtataaaagatccctttgtcggttaacgtacgctgctcgaggagcggcaggttgcgcgccagcaggcggaagtagggcgagtcgctgtggccgaatttcgccagcagcgcctgctcgtcgggggtaaattccgccagcggtttagccgccagccagggctcccagtgcagttcatcgcgggtgaagtgcaccggcgccttcttaccgctgatggtttgcggcgaggtatgccagaatcccgccaccgttggggtttgtgcgacgtggatatttttgccgttaagcaggcgcagcccgacgaccagccggctctggaagctgacaaacgcgataagctgggcgagggtgacgatgccgcgcaggctccatccggcgcggattaaggcctcaagcgccgacggcgtggcctccacgggcgtaaaggtcaacagccgggcaaaggccagcgccggcgccagccgcggcgatgtggggtcggcaatgccaaagccggcgtagtgggcggccagcgcatcgctctcatgcagcttcgccacccgcgcggccacggcaaaacgctcgtcgagcggaaagtcgttatcctgctgaccaaacagcgtttcataacttccctgagcatggcgggtggccgcctcgcgcacggctcgcgccgccgctaaggcggaatcgggggcaatttctgccagttcggccaatatatcctgactgagcgtcatggtgactccttatcgtatctgcggggcaatatgctgagcgatcagctcaatggaacgaagcgtgtcgcggtgcgagggttcaacggagtgcacctgaaacgaaatatcggttacccgccgcaggacgctatcgcgggccagcgaagcggcgacgtgctgcgggtcgccaacgtgcgcgtcaagctgcggcaaaaaatcagtgacagtgtcaccaataatatcatgacctgcggcgcgatgctgggcagcctgctggcgcaggccgggttcagcgacctgcagcgcataccgctggctatcggcgacaaaggccgtccgcgaggcgaggatccttggctcgacgcccgccggcagcgcggcgagataggcgtcaataatcggattctggatagcgtccagcggcagcgtgggctgtccagccggacgcggctgcgtgcgcgagagcatcagcccgtgcccggcctgagccgcgcgaaccgccccctcaatggaaaaggtggcaatccagatgcgctccgccagctgcggcgcctgagggtacagatgattatccgggtgcgagagcgaatccccgcgccaggcgctttgaatcagatgcaggtgttcggcaaataccgcgctgcgctggtccatcgtcagcccgaagggtaaaaacgaagtgggggtgccgccggagccgaagcccacctccagccgtccatcggcgagcagatccagcaccgccgcatcctccgccacccgcagcgggttttccatgggcagggtgataatggcggtgccaagacgaatgcgctcggtgtgcgccgcggcgtgggcgagaaagaccagcggcgacggcaggccgccttcgtgctcatgaaaatggtgctgagcgatccacgcgctgtcgaatcccaggcgttccgcgtggcgaatttgctcggtggccagccggtagcgctctttaggcgtggcgtggtccagcagacgggtgaaaaagcccagtcgtttacgcgtcatgcaacctccttgctcggggatgaaaaatggggaatcgcggcgataagctcgcgggtatagtcatgctgcggggcgctgaacagtcggctgacgtcgccgtgttcaaccacctggcccgcccgcagcaccgtcacgctgtgggcgatacggcgcaccgtcgccaaatcgtgagtgataaacagatagctcagccccagctgctgctgaagctgctgcagcagcgcgagaatttgcgcctgcacagtgacgtccagcgccgaagtcgcttcatcgaggacaaggatcgtcggttcaaggattaaggcgcgggcgatggccacccgctgccgctggccgccggaaagctcacgggcggttcgcgacagcagctccggagcgagcgccacgcgggcggcgaccgtttcgacgcgctggcgccgcacttcggcgttgaggcggtcgaagttttttaacggctcttcgataatctcaaacagcgtttgccgcgggtcaagcgaggcaaaaggattctggtaaacgaactgaattttacgccgcagctggcggagcgcctcgcggctgagatgcccggcatcgataccgtcgatagcgatatggccgctatcggccttttcgaatcccagcaggatccgcgcaagggtcgttttgccggagccggactcgccgaccagcgcgtgggtgctgccgcgcttcacctcgaagctcacggcgtccagcgcctgcaaatgcgcgcggcctaatgagaagcgcttgctgatgccctccacgcggatcgccggggtcgccagtacgcgcccgctggccggggcaatggtcagcgtcgaaccctggagatcgctcagcagctggcgggtataggtatgctgcggcgtacgtatgacgtcgccggtcgcgccctgttcctgaatctcgccgtggcgaaagaccagcagacggtcggcgcgttccgccgccagcgccagatcgtgggtgacgaacagtaccgccgtgccggactcccggcgcagcgtatccagcaggtcgaggatccgcttctgtaccgtcacgtcgagggcgctggtgggctcatcggcaatgattaagtcgggtttcagggcgattgcgatagcaatcagcacccgctgcttcataccgcctgaaagctggtggggatattgatcgatgcgctgttccgggtggctcagcccaactttggtcagcagcgccagcacctgcgctttacgcgccgcggcgctgcttttttgatgcagacgcaggatttcgcccacctgcgcgccgatggtttttaccggattcagggagttgcccggatcctgaggcaccaggctaatccgcgcgccgcgcagaccgtcgaggcgtttagcggaccagccgctgatatcttcgccattaatcaagatacgcccgctgtcccggcgcgcgttatccgccagcaggccaataatcgcctgtgcggtggtggttttacccgagccggattcaccgacaaacgccagcatttcgccgcgtttgacctgaaaactcacgtcgtgcacgacctcgcgccattcacgctgtgaacgatagctgatgcgcagatgctctacgcttaaaacattcatcggcgttctccgctaaattgacggctaatacggttggcggcgagcacgaccgcaatcaccgcaataccgggcagggtggtcagccaccaggcggtggagagatagttgcggccttcggcgatcagcagaccccactccgggaccggcggcggcgtgccgtagccgagaaaactcagggtcgagagcgccagaatggcctggccgaactggagggtggcaaaggccagcaccgcggtgagcgagttgggcagaatatgccgccagaaaacggcgaaaaaggtgccgccgctgccgtaggccgcttcgacgaagtcgctgtggcgtacgcggaccacctccgctcgcgccaggcgggcaaagctggcgacggccgccgcgcctaccgcgacggcggcgttgagcgtgccgaaaccgagcagaatgatgaccgtcagcgacagcaataaagaggggatcgccagcagcacgtcgaccaggcgcataattgccgactccacgcgtcccgccagcgcgccggccagcgtgcccagcgcggtaccgataaacaggccgatcgccaccgccgccagcgcggcggaaagcgaatgaacggcgccgaagacgatgcggctccacagatcgcggcccagctggtcggttcccagccagtggccggcctgcggggccagccgctgggcgccggggaacccttccagcgggctatagtcggtaaacagctgcggagcgatagccatcagcgcggcaacgatcattaccgcccaggccagcagcagaccgggctggacgcgccgtgtacgccagtttgacgtgcggcggcgcgcggcggttgcgtaatccaccaggctcatacggcacctccgataacggctttcaggcgcgggtcgaacagcggcatcagcaggtcgaccagcaggttaatcagcacgaaaccgagggcagagatcatcaccaccgcctgcagtaccgcgatatcctgattattgacggcctgctgcgtcagcagccccagaccgccgcggccaaacacggtttcggtaatcagcgcgccggcgatcagttcccccagcagcagaccggcgatattgagcaccggcagcagggcgttgccggtaacgtgccgccacagggcgccggtttcgctcaggcctttggcgcgggcaacggcgacaaacggctgcgcggcgacctgatccagactgcgcatcaggatttgcgccagcggagcggaaatcggcaccgcgacggcaataatgggcaaaatcagcccctcaatcggcccgggattgatcaccgggatccagcgcagttgaaaggagaaaatctgaatcagggcgatgccgagccagaacgtcggcagcgagataaacagcgccggcagggattgcagcgcgttgctgaaccagcgcaggcccggcagccgtgaggcgaaggcgagggcgaaggccagcgccaccgccagagcaaaggcgggcagcgccaggcttaatgtttccggcaggttgctggcgataagcgcgctgaccggcagcccggcctgcagcgaatagccaaaatcgccacgcagcatggccatcagcgtgtggaagtactgtctccacagcgggctatcggccccgtaggcgaggcgcatttcggcgatctgctcagggctgagccccagatccggattctgaaacttgatcagtaccgcatcgccgggtagcacctgtaacaggatgaaggagagggtaaacgcggcccacagcaccagtaaaccctgaccggaccgccgcagaagatagtggctcatcgcgggctccttagtgcttttccagccacgcgccgtagaacgacgggcggcctaccgcttcaaaactgacgcctttcacccacggcgcgccggcaaagacctgcggctcttcaaatatcgggatcacgtaggcgttgtccagcaggtagcgctgggcgtcgccggtgagctggaggcgtttttgcggctcgacttcggctgagatcgcggtcagcagcgcgttgagcttatcgtcgcggaagcgttggactttgtcgctggagccgcctttttgcagcagcgcgtcgcggttagcggggaagaacatgcttttcaccacgtcagggtcggcgcggcccacttccgacacggtaagcggcgttttcaacgggtcgaggctgtccagcgtacggctgccggcatcaccggctttgaccgccagcgcaacgccgacctggcgccactgctgggcgacaagctggagtacctctttgttttgcggctggggcagggattcatagacggttaatgccaggcgctggccatctttgacccgtataccgtcggcggccggtttccagcccgcctcatcaagcagctgtttcgctttggccggatcgaaaaccagcttatcgctgaggttaacgtatccggccgcggtgctggcgacgacggaggtcgcctgcggatagttggcggagaacagggtttcaaccacctgtctggcgtcggtggcgtgcagcagcgcctgacgaacgcgcaggtcggcaaccagcggattatccgggcggaagctcaggctgtcgttaacgccgcgcgtcggggcggcatagattttaaagccccgatcggttgcctgcttttcatcataggcctgcacctggcgaataaaatcggcctggcctgccagcagcgcgccaacgcgtacgccatcttccggggtgacgatataggttatgccgtcgagattcgctggcccctgctgggcgaggcttttcggcccccattgataatcctgacgtgcgaccagagcgagttcacgtcccggcttttcatctttaaccgtaaaaggcccggagccaataatatggcgggcgtcgcccagctcttcaaaatttcgcgccagggtgctcagggaaaccagcccggagccgatggtcgcggtgccctgcagaaatcccggcgagggctttttaaagtagaacttaaccgtcagcggatcgatgacttcgctgcgatcgtagttattaatcacctcggacaccggcaggcggtgcgctttattaccgaggccgtaggtatcaaagtttttggcaaccgcattggcgtcaagcggggtgccatcagaaaaggtgacgccagggcgaatcttaaaggtatattcggttttatccgcgttggcgctccagctttcggcaatccacggttcgacttgtaaggtttttggattttgccaggtcagcttatcggttatttgattaagaataccgccgttagggtaaaagcctccggccgggggataaagattggtatgcggctgctgctccagataaattaacgtgccgcctttaaccggcgcgtcggcggcccacgcggaaaacgcgccgctcaaaaaaaatgccgccagcgcgggcaggcgaaaacgggtgtgcatggtgaattcctttgttatctcttgtttggccatcatcgggcgcgcgttttaacaaaggaagtaaggatttgcgctaagcatttgcataaaaagcatttatacccggctcgatttttaggggctggtatttacatgcctttcagctgaaactcgtgctggataatttaatgactgagagatagtcagcgtaataaagggatagcgacgatgctgaagtatttactgatgttggcgatgacggtgctggcgggctgtaccagcgcacccaatttgccctctactgataccattattaaggttaaacctattgagtcaggcatcattgccaattcaaacaaatacagctatcgattcttccgtaaaggggtgccgcaggagtaccagcgttataatactttctacgaacgcttcaataaggtcgcatccggcgtacgggtgaattttgtcgtgaaacagcatgaggttgttgcggaatatctggtggtgctcgacaagcgcagactggatgccagtcagctaagtctgttaaccagccagtatcacgcgaccgcgctggacaacgaccatcttggcgtactgtttaaagcgaccggtttctggtcaaccgttgatcccaatgagctggatgacgcttatcgccttgccagacccgtcgtcgtgtcaattaacgataaaacgcagaccattagccctctgggagagatcgccctgattccgctggtgccgctatttcctctggtgatgatgtacggttgcgcaacggggccgtgcgtgtaaagggacaattaaacctctcccgtagcgggagaggtccgaagattagcggcggaaatcaatgaccatacggccgcgaatctgtccctgttccatctctttgaagatggcgttgatatcgcccagcggacgcagggtcactttcggtacgactttcccttccgcggcaaactggaaggcttcggtcaggtcctgacgggtaccgaccagcgaacccaccacttcgataccgtcgaggaccagacgcggaatgtccaggctcatcgcttccggaggcaggcctaccgccaccacgcgtccacccgcgcgaaccgcatccaccgctgagttaaacgccgctttggcgacggcggttaccaccgcggcatgcgcgccgccggttttctcatgaataattttggctgcgtcttcgctgcgggagttgatggtcaggtccgcgcccatttccgcggccagcttcagctgttcatcattaacgtcaagggcgatgactttggcgttaaacacgtttttggcatactgcagcgccagattgccgaggccgccgaggccataaatggcaatccactggccgggtttgatatgtgagactttgaccgctttataggtggtgacgcccgcgcaggtgatgctgctggccgccgcagaatcgagcccgtccggcactttgaccgcgtagtcggccatgacgatacactcttccgccataccgccatccacggtatagccggcatttttcaccgagcgacacagcgtttcgttgccgctgttacaatattcacaatgcccgcagccttcgaagaaccacgccacgctggcgcgatcgcccggcttcagagaatgaacgccggggccgacctgctgcacaacgcccacgccttcatggcccagaatgaccccggttttatcgccaaagtcgccgttcttaacgtgcaggtcggtgtgacatacgccgcagcaatccatttttaaaagggcttcgccatgttgcaggggacgaagcgttttttccgtaacattgacctgatgatcttgcgtgacgacagcagctttcattctgttctccttattgaacataagcgtattaacacaattttgttttttacgcatgctaaggtttagcttaaatcttcattaaatcaagggaataatagatattccttgccggggtgagcttggtgcgccgattttttaatcagaattattaatgaaattcgcgtcacatcactgtcatcgttacgtcatgcacgcttcatttgcggcctctatcgttctgtttttcaatttcttataacgatagagcgacacgacaatgcatctggtaaaaacactccttgcctcaggccttctgctttccgctaccgttcaggcgcagaacgtactggatttcccgcagccgaaaaacaaccctgaagagttttatgccgtgaccgaaattcccgcgggcggcattatcaaatatgaaaccgacgccaaaaccggctttttgatcgccgatcgtttccagtcaatgccggtggcctatccggctaactacggttcgctgacgcaatccctggcaggggatggcgatccgctggacgtggtgttttacacccgcgcgccgatggcgccgggaacgctgattaagctgcgcgcgattggcgtgctcaagatgattgatggcggcgagaaggacgacaaaatcattgccgttccggcaagcaaaatcgacccaacctacgatgacatcaacaccatcggcgatctgccgaaaatcgagcaggagcgtttgcaggctttcttccgcgtttacaaacagctgccggaagggcgtaaaaaagtggagctgaacggctttaacgatgccgccgccgcgaagcaggaaattaaagcggcatgggatgcctggaaagagaaaaatccgcaataagcggaaaaacaggcatcgcccggtgcctgtcgctttttcttcgccttattctccgcagagcgaggtaatacgggggactacgccggaaccgccgaaatttccgttaccctgcgtccttttcttcagccccagcgtggcgacgatgcgctcgaaattgcttttttcacgggtaataagtccaggtcaatctcactgctgacgttgtctcatatcactggtacgatataaatctctttcacggcccttatacgtacatatttatgacagaaatacgcattggctatgcccgatgttcaactgaccgccaggatctggctcaggcggcagttcgccagggagacacgctggtcgtaccgaaactggacaggctggcccgttcagttccggatgcaagagatattgctgatgcccttcaggcccgtggcgtgaagctggcgctgggcaacaggataatgagattgcagacatcatcaccaggatgattcgataataatgatgagtcttattaaaaggtttttcagacggatattctggtcattgatatcgatgtacggtcctgccttattgacacttttatttgcaattgtcctttttcaaattttccctgatggaccaatatggcctgtccccatattctgcatttttgtgatcgttgttttttatcgatacgtgaaatggtaatcatcaaaacatcaaattttagcattgtttgaaatttatttataaggaaatgctatgtctacacccgcacatggtaccaagggaggccattgcctcacttggctctgacgaggagataaaatgatcgacttaaccgccaggattgatatcgttaccggctatcgtccgggaatgattggccgcattacgcagatgcacggcgagtactatgcgaagcattatgaatttggtcactttttcgagagcaaagtggccagcgggctagcggagttttccggtcgtcttgagaaaccgtgcaaccgggtttggcttgccattcagggtgagcagattgtcggatcggtggcgattgacggcgaagatcttggtaataatgaagcgcatctgcgctggtttatcctcgacgatagctgccggggaagcggcgttggccgacgtctgctgaatgaatcgatggccttttgcgatagccagaacttcgccgcggtgcggctgtggaccttcagcgggctgaacgccgcccgcaggctgtatgaatcctttggctttacgctggataaagcgtggcagggggatcagtgggggcggatgatgaccgagcagcagtttagtcgggtcaaaccggcttcgcctgccggcgcggaataatctcccggcgcggatcgccgcgccgggagagcgcctgttaacctaataacgtcgcaatcgttgttatctccttacgccactgcgcctgcagctgcggtttttgatgttttggtttgcgcgccagatcgtcggccagcagctgctcaagcgtgactaaccgctccagcagcgcatcctggtcctcctccggttcgctactgttcaccgtcgcggcctgcgtcgccggacgacgaacggcggtgcgcaaaatctcatacacctcttcgctgctgtgccattcgctcagcccgcgctcgtcgataagccagaagcgattgcagctgcggttaatgagctcgcgatcgtggctcaccagcagcaggccgccgggatagtcgcgcagcgtagccgccagcgccgttttgccatccatatctaaatggttggtgggctcatccagcagcagcaggctatagcgggccagagagaggccgacgaacagcaggcgcgaacgctcgccgccgcttaaggtggcgaccttttgcccgtgacgcggccagttgaatccggcggaaattagcgcccgcctgcgcgcatccgggcctggttcaaagggctccagcgcgtcgagaagggtatcgtcatccgccagctgatgcagggtctggtcgtaataacccggcttcagccgcggatgcaggcgcaaaccgctttccgtcgtttcctgctgcatttgccgccacagcagacgcagcagcgaagacttgccgccgccgttacggcccatcaccgccacccgatcgccgcttttcaggcgagccaggcccgcggtaaacagggccggcagaccgggcgcggggggaacggggagctgttccatctccagcagtcggtcagcccgcagcatgtcgccgtggagcgccagccgccagggggtgcccatggtcagctcggtttggctctccttcaggcgttgaacctgcttctccatctgcttggctttgcgggagagatcttcgttgtcataggtccgaccccagatagccagccgtttggcgctggcggcgacccggtcgatctccttttgctcggctttatggcgctgcgcatcgctggcgtcctgctcttccagcgcccggcgggcggcgctgcagggcagggagaaggcgtgcagcgttctgtcgcgcaggatccaactggaattagttacagcatccaataagatattatcatgcgacaccagaacgaagctcccctgccaggtttgcaggaagctttccagccacaggagggtcggcaggtcgagatggtttcccggctcatccagcagcaggagatccggctgcagaatcagcgccctggcaagcagcagccgggtatgctgaccgccgctcagggttgacgcccgctgcgcggcctcatctggtgtaaagcccatctctgccaatagcctctccgcttgccagcgctgactctcacgctcaggggcgggaagtttcgccagtactacctgcagcaggggctgcgctaacagcgcatcgggtagatgctgttccacacgcgccatcagacagtgactggccagcgccacgcagcccgaactgggcacgatcgtgccgtccagcacctgtagcagggtactttttccgcagccgttatagccaatcaggccaatacggtcgccttttttcagggtaaaggagaggtttgtgaacagcgggccaaacgccgtatcaacatgaagagattgtgcagttagtaatgtgctcattgtgaacttactcaagagttacaggcatgtgaatgcctcgtcaaacatcgctgacgataacccggtaagcccgagggaagggagttagtctatggtttcttcgctcaagctgaagttatcgcagcacgataccgataacgcttgagcaggtgcgatcgccaaatgcacgtgaaaaaaacatttcacagtacgacatgggatcctccttttttattcagtgagttgatgggtgctggcagtgtagagggagaaagcggttttgaccagatgagaataaaaaaaggcctgcaaagcaggccccctgtatgactcatctaccggttaaatcgacgtgcggcggtagttccggtactccggctgccagaagttatcggcgatcgcctgcagcaacgcttcggcggaggttttcaccgccacgccctgttcctgggcgattttgcccaccgcaaacgcgatagcgcgtgaaacgctctgaatatccttcagctccggcagaaccgggccttcaccgttattcaccagcggcgaatgtttcgccagggtttcgctggcggccatcagcatctcatcggtcacgcgcgatgcgcccgaagcgataacgccgaggccaattcccgggaagatataggagttattgcactgggcgataacgtactgtttgcctttgagggtgaccggggcaaacgggctgccggtggcgaccagcgccgcgccgtcggtccagctgaggatattctgcggcgtggcttccacccgggaggtcgggttggacagcggcatcacgattggccgcgggcagtgcttgtgcatctcgcggataatctcttcggtgaacagccccggctgcccggaaacgccgatcaggatatccggtttgacgttgcgcaccacgtcgagcagcgacagcacatcattcgtggtgtcccacgcttgcaggtgctcacgcttttgcaccagtttgctctggaacggcagcaggttcggcatggcgtcggtcagcagaccgaaacggtcaaccataaagacacgtttacgggcttcctcttcgcttaacccttcgcgctggatttgcgcgacgatctgctctgcgataccgcagcccgcggagccggcgccgaggaagacaattttctgctcgctcagctggctgcccgcgccgcggctggcggcgatcagcgtaccgacggtgaccgaagcggttccctggatatcatcgttaaaggagcacacttcgtggcgatagcggttgagcaggggcatggcgtttttctgcgcgaagtcttcgaactgcagcagtacgtccggccagcgggctttaatcgcctggataacgtcgtcgacaaactgatagtactcgtcgtcggtgatgcgcgggtggcgccagcccatatacagcggatcgtccagcagctgctggttgttagtaccgacgtccagcaccaccggcagcgtgtaggccgggctgataccgccgcaggtggtatacagcgacagtttgccgataggaatgcccatcccgccgataccctggtcaccgaggccgagaatacgttcgccgtcggtcatcacgataaccttgacgttgtggttcggtacgttttgcagaatatcgtcgaggttattgcggttctgataagagataaacacgccgcgggcgcgacgatagatctcagagaagcgttcacaggcggcgccgacggttggggtgtagataaccggcatcatttcgtcaaggtggttgccgaccaggcggtagaacagcgtttcgttggtatcctggatattgcgcaggtagatgtgcttgtcgatctcggttttaaatccctggtactggatccacgcgcgttcggcctgttcttcgatggtttcgaccacttccggcagcaggcccagcaggttgaagctgctgcgctcttccatgctgaaggcgctgcctttattgagcagcggaaattcaagcagcacggggccggcgtaagggatgtatagagagcggtttttcttatgagtgaattgcatcgcactaactccttgataatcgcttcagcccgggcgcggcgacaggcggggggctggcagggaatggcagcgggcagagtataaagcagaagacatcaaaggagggtaaacatgaggccgatagtcttaaaaaaacaccatcccggggagaggacggtgtttttatcatcattcagctgaaaagttagccaccgcggcgcttgcggccggtggcgcgaacatggttaaccgtggtttccgcatcgccttccagcagcacttttttctgctgagaaagcttgtagttcagaccaagaagatgacgtgcctgttggttcgatttcattcttactcctttatcctgtgtcggtttcaaggacaagcccgacgggtgtcggacgaaatttaacccttaagtacgccgcgcatttttagcgcggcgataatcatcgtggcccattttgccgggattagcaacgttgagtcggcagattaagaacagtctttttagcggaccccggttcgtcggccggacaggaggtcacccgccatccggcagaaagacccgcacgttagccagtcttaccacttcatttcgccggtattcactttggcgctcagatccagcgaactctcttccgcgagtcccggccagcgctgtttcatcgctttgataacgccggtggaatctttgtgcgcgttgagcgcctgctcgaactgggtcagataatcgcgggtaaaggtaatcgcgcggtcgcctgcgggcggagtccccaggtaatggccggggatcacctgctgcggatgcaacgcggccatctcgtcgagcgtacttatccactgctggcggctttcgacgctctgggtatccgccgtccagacgtgcatgccccacgccacgccggtcccgccaagaatggctttattcgccgggatccagacataggcggcataattttgcggctggcggatctcaaccttttcgccgtcgatggtgaaggtgtttgccgtcagcgcttgcgggacgtaaacctgcttcggcgcgccgtccttcatctgcgggccccagtaggccagtttggccgctttggtggcgttaatgtgtttaaccacttccgcggtcgccaccacgttgacatccgggaaagccttcaccagcggctcgaggccgaaatagaagtccggatcgccggaggtaatcacgatgcgggtcagttttttaccgcttttcttaatcatttcaaccagcttctcgccatctttgacgctgaattgagcgtcaaacagcaccgcttcatgcgggccggaggcgagggtggagttaaccgcgaaaatgccgttctcctgcgggttgtaggtttgcagcgttaggggcgcggccagaactgacgtgctgaacagcgtggttgcgatagcaagggcagataatttcatattcgttttctcttggtcaggtgaatgagcgctattgtacggatttcatgatttgcgaaaattcctgaaaaaagagatgctgagtttcataaaacgtgcagatggaaatcagttatggatcgggtaattgccgcgcaggtgtatatgcgcatttgtgaactggggagcttaagcgccgccgcccgcgcgctggggatgtcgcgtccgatggtcagccgctatctggaacagatggagcagtgggcgggaacccggctggtccatcgctcaacccgcaaactgacgctcacggctgcgggggaaaaggtgctgcaaaaaacgcgcaccctgacgcagctgtcggatgagatcgccgggcaaagcgagcgtgcgatccccagcgggacgctgcgcgtcgcctgcgctcactttacggcgatgcagctgatttcgccgctgctacccgattttctcgcccgttatccgcagctgcgccttgagctggatatcaataatcacccggtcagcctgatcggcgaacggatcgacgtggcgattcggatcaccgacaatccggagcccggggctatcgcccgccgccttggcgtgtgtcgttcggtgctgtgcgcgtcgccgcgctggcttcagcagaacggtccgctgcaaacgccggaagatctcactcgtcacaactgcctgcattacagccattttgccagccagacctggcagtttagcgacgtcagcggcgaaaacgtggcggtggcggtttccggcaaccttagcgccgggatctcctcgctgctgatggaggcggcggtcgccggctgcggcatcgcgatgctgccggagctggaggcgcagcgggcgctcaacagcggggcgctgaaacaggttttaccggcctggcggccaaaagcgctaagcgtatatggtatttacctttcacgggactatcagccaagcgcgctgccgctgtttctcggtgagatacagcagaaactggcgcaaactcacgatataaaaggaaccctttaatgatagtgcttcgcccaatgcgcgatacggagtaccccgcgtatctcgactactttatccccgactacgcggcggaaatctccgccaattacgcgctctcgccggtggccgcgttagcccaggcgcagcgcgaaatcgccgcggatctgcccgacggcgtcaatactcgcggccaggttttatgctgcttattcgatgacagtgacggcgcagaaaagcgggtcggctatctctggtacaagcctgacgaagaaatgcgctccgcctttatctgcgatttttatatttatccggcgtttcagggacagggcctgggtaaacaagcgatggcggcttttgagcatgcgctgaaaagccaggggatcggccaaattaaactgcgcgtcgccggggataatcagcgcgcgcgccatctctacgacgccgcgggtttccgcgttaccggcgttaatatgagtaaaaatatcccgacggattgatctgaaaaacgccgcgcgccgcccaaatgccttagggggttctatacttaactctttcatatcaaaaaaggagcgatattatggcaatccataagaaaggtcaggcgcattgggaaggggatctgaaaagcggaaaaggaaccgtctcgaccgagagcggcgcactgaaccagcagccttatggttttaacactcgtttcgaaggcgtcaagggcaccaatccggaagagcttatcggggccgcccatgccgcctgtttctccatggcgctctcgctgatgctgagcgaagagggctacaccgccacctccattgataccgtggcggtggtgacgctggataagtccggcggcggctttgccatcacccaaatcgcgctgcagagtaaaattgtgctgccaggcatcgaggccgatgcgtttgacggcatcattcaaaaagccaaagccggttgcccggtgtcgcaggtgctgaacgcggagataagcctcgactaccagctcaatccataagctcgctggcgcccgctatcggcgggcgctcctgccctaaaagccatcgttggcaaatgcccccggcgttaataaatgctatctttctcgctcacggatcagagcaggtgggtaatgaccagcatacgcggaatgattgaagctcaggttctgggcttaaccggcatggcgctaaaagagatcgattttgaacaccccaaaggcgaaccggggctatttggtccgcagtcggccatctggcaggttcatggcgattttacctccatgctctgcggcggcgtcagcgcgctgctgttacagatgctgcatcctctggcgctggcgggcgtctgggatcactcaaacttccgcgaagatatctttggccgcctgcgccgtaccagccagtttatttccgccaccacctttggtaccaccgccgacgccgaacggctgatcgcaaaagtgcaggggatccacctgcgggtgagcggcaaggataaagatggcacgccctatcaggccagcgacccggcgctgctcacctgggttcatgtcgccgaatgcagcagctttatggcctcgcacctgcgctacaagcggaccgtggtcagcgccgctcgccaggagcagtattatcaggaggccgccgaaattgcccgccaccttggcgctcgggatatcccggtaacgccgcggcaggttgccgactacctgcaggatatgcgcccaacgctgcgctgcgatgagcgaacgcaggaggttgccgacgtcctgctatcgacccgtctgccggggcgcctgagtcagcccgtcgggcgaatgatgatgcgcgccgggattgacctgctgccgccgtgggcgcaggcgatgctcaatttgccgatgagcgcgctgcagcggcacagcgcacgaattgcggtacacggcgtcgcccgcgtactgcgcgcgtcggtgcgtaacggcgcgtatcattgcgcaatgcgccggatgaatcagttttaattattccggctgcgtttttacgccaaaaatatagccacggctattattgtcatggctatattttttaaaaacaaactattctcatttatatatttgacagcaataaaaataagtaaacattctcttaacggcggcggattattcaggaaaaattaagctaaatcgcgtacgttatttctttttttacggggacgtcatcatggcgaaaatgactgacgatggtcagcgcgcccagattgcgcgtaaaacgacgctggtcagcgtggtggtcaatctttttttatccagcgcccaggttctggcgggcgttttttccggttcgcagggattaattgccgatggtattcattctctttccgatttagtcgctgatttcgtcgtgctgttggccaataaaaaaagcggcaaaccctcggatagcgatcatcactacggacaccggcgctatgaaaacggcgcttcactggtgattggcgcgctgctgttactggttggcgcgggtatgctgtggtccgcctgcggcaaactgctgcatccggcgtctatcccgagcgtgcatattaccgctctgtgggtggcgctcgccgcgctgaccgccaaagagatgttattccgctatatgctcagggcggctaaacaaattcagtcgtccatgctgattgccaatgcctggcacgcccgctcggatgccgcgtcgtcggtggtggtcgcggtcggcatcatcggtaacctggccggcttcgcctggttcgatccggtggccgcgctggccgtcggcgcgctggtcacccgcatgggctataccttttcgtatgacgccctccatgacttgatggatcggtcagtggatagcgacagcgagcagcagataatcaccactattctggcaacgcccggcgtcgtggcgctgcatgacctgaaaacccgacgcgccggcgatgggatcctggtcgatgtacatatcgaggtgccgggagatttatcggtggcggaagggcacgatattgcgctgttggcccgcgcgcgggtgctaaacagccaaaacgtgctgcatatgatgattcatattgacccttgccgcgcggatagcgacgcgattatcgcttaggttattcccctgaacgcttgagggctttgtcagcctgcggataatattgcctgtgaaataaaaaaggaccataatccagcggctattctttcatcgctgataaatagccggctgacgccgtgtcgtgtttttaaacaatataaaaaggcaatcgcataatagaaagtatctattattcgttcgaaacttcaggaagtaaaacaatgattatccggccagaacaacactggttccttcgcttgtttgactggcacggctccgtgctgtcaaaaatcgtctttcgcctgctgcttaacctgatgatgtcgattatcgcgatcatcagctatcaatggtacgaacagctgggtatccatcttaccgtcgcgccgtttagcctgctggggatcgccattgccatttttcttggctttcgcaatagcgccggatacaaccgctttgttgaagcgcgcaatttgtggggaacggtgctgattgcccagagaacgctggtgcgccagctgaagaatatcctgccggccgaaagcgcagcccatcaacgcctggtgagctacctggtggcgtttagctggagcctgaagcatcagctgcgcaagacggatccgagcgccgatttagcgcgtctgctgccggcgcaaagcgtggcggaaattctcgccagttcgatgccaaccaaccgcattctgctgctggcaggcgatgagcttgggcgcctgcgcgcagaagggaagatcggcgatgtcaccttcagcctgatggacaataagcttgatgagctggggcacgcgctgggcggctgtgagcgcctcgccagcaccccggtgccctttgcctacacgctcattttgcagcgcaccgtgtatctgttctgtacgctgctgccgtttgcgctggtcggcgatcttcactatatgacgccgttcgtgtcggtgtttatctcctacaccttcttgtcgtgggattcgctggcggaagagctggaggacccgttcggtaccgcagccaacgatttgccgctgaacgcgatgtgtaacaccattgagcgcaacctgctggatatgaccggccagcatcccttaccggagaaactggcgccggaccgccactacaatctgacctgatttttgtatgtttattattcgttaaataagttaaatctaacgcgtgatagataacattgattatacagtcaccgctctgattgttatgctttcgttaacaaaaaacacccgttaccctggctggtaacgggtgataagagatcgtgcggcgtttcacctgccatacgccgccgaaagcgcatcaggagtgaacatgagtaacagaagacgcgtcgttcccggcgtccatccctatgatggtccggcgggcggctggggtgccttaaaagccaccgctatcgccgttcgtacgcaaatggatgcgctcgatgcccccgccacgctgctgcggaccaatcagccggatggctttgattgtcccggctgcgcctggcccgacaaagagcataaatcgacgtttcagttctgcgaaaacggcgccaaagcggtgacctgggaagccaccagtaaacgggtcacggctgagtttctcgcggctaacaccgtgacgtcgctgctggcgcgcagcgattttgagctcgaaggctacgggcgcttaacccagcccctggcctacgataaggccagcgataccctgcgtccggtctcatgggacgcggcgtttacccgcatcggcgccattcttcgtacgctgcagcccaatgaagtcgagttttatacctccgggcgcgcctctaacgaagtggccttcctgttccagctgtttgcccgcgaatatggcaccaacaactttccggactgctccaatatgtgccacgagtcgaccagcgtcggcctgccgcagtccatcggcatcggtaaagggacggtctccctcgatgactttgataagaccgagctggttatctctatcggccacaatcccggaaccaaccatccgcgcatgatgggcacgctgcacgaactggcgcgccggggggtgccgattatcgtcttcaacccgctaaaagagcgggcgctggagcgtttcgccgatccgcagaacgtcattgagatggcgacctacggctcaaccaacatcgcgtcgacctatttccaggtcaaagcgggcggcgacgcggcggcgcttaagggtatcgcgaaggcgctgctccggctggaagcagagaagggcgatgtgctggatcgggcgtttatcgatgagcatacgctgggctttaccgagtttgcgcaggatgtggacgcgacgccgtggccggatattgaacgggagtccggcctgacgcgcggcgatcttgaacgggtggcggcggcttacgctaaatctaacgccacgattatcacctacggcatgggcatcacccagcacaataagggcacctctaatgtacgcctgatagccgacctgctgctgatgcgcgggaatatcggcaagccgggggccgggatctgcccgctgcgcgggcactccaacgtacagggcaaccgtaccgtcggcatcacggaaaagccgagcccccagtttctcgccaacttgcagcgggtgtttggttttacgccgccgcaggagcatggtcacgatgcggtaaaagcgctacaggcgatgatcgacggcgaatcgaaagcgctgctctgccttggcgggaacttcgcggtggctatgccggatagcgaacgggcttttccggcgatgcgggggctggatctgagcgtgcatattggcaccaagctgaatcgctcgcatcttctggtggccaatgagacctttatcctgccgtgccttggtcgaaccgaactcgatattcaggagacgggacgccagtcgatcaccgtggaagattcgatgtcgatggtgcacgcgtcgtctggcaagctgaaacccggttcgccagagctgcgatcggagccggcgattgtcgcggcgatggccatggcgacgctgccggaaagcaatgttgactggctgtcgctggtcgccgactacgatcgcattcgcgatctgatcgagcagaccattcccggctttgaccagtacaaccagcgtattcgccatcccggcggttttcgcatgccgctgccgccgacggagcgtatctggccgacgccgaccggcaaagcgatgttttccgtttttcacggggtgcacgaaaaccagcaggtagcagggcatgacgtgatgcgcctggtgacgctgcgcagccacgatcagtacaacaccaccatttacgccatggacgaccgctaccgcggcgtgtttggccgtcgcgacgtgttgtttatgaacgagcaggatatggctgagcagggattcgaacacggcgatcgggtggatatcagctccgcgctgccgggccaccatcagcggctggaagatatcacgctggtcgcctacagcatcgcgccgggcaccgttgccgcctattaccccgaagccaacgtgctggtccctctggattatctcgataaagagagcggcacgccgtcgtataaatcggcgcccgtccgtttaacgctgcgctcgaaagagatccgcgcgctggcggggcttcgctaaagcgccgtttgcccgcggcgatcgtcgcgtcgtgggcaaaatcgctacctctgcgccagaatcagcttaatccccagcccgacaaaaccggcggcaaagcaggctctcagcccctgtaacacccgcggacgcgacagcacgtatccgcgcatcgccgccgaaaaggcgccatagagcataaaaaccagcagcgtcatcagcataaaaacggcgctcaggatcagcatttccccgatcggcgaagccgagccgcgctggataaactgcggcagaaaggcgagaaagaagagcggcagcttggggttaagcaaattaatcagaatcgcgtggctgatgacctggcgcgggttgcgttgttcgacgccctccacgttcaggctgccgcgctgggtcagggtggcccatgcgaggtacagcagccaggcgacgccggcgtacttcaccagctcgaaggcgccgggggtgctgtggaggatggccgccagcccggttatcgccgccagcatatgcggaataatgcccagcgtgcagccgaaggccgcggcaaaactcatgcctctgcccgccgccaggccggtggcaatggtgtaaagcgtcccggtgccgggggcgatgaccacaatcagcgaagtcaaaagaaactcaggggtgatgaacgccatgatgtcattcctgttgcagagaatcgaggccctgagtatttcgcaaagccgcgcgccggtattgaacaaaattgcacaacgtcggctagcggctcgcctgatagctgcctggggtcatggcgaactgcctttgaaacgcgcgggtcagatggctttgatcggcaaagccggccatgaaggcggtatcggcgggggagtgaccttcggcgagcaggcggcgcgccagacgcaggcgggcctgtaccagataagcgtgcggcgtgatgccggtttcgcgagcgaagccgcggatcagctgaaagcggctgaggccgcagagggtagcaagcacctcgagagagattttctcttcgggggcatcatcgagatattgcctggccagcgcgatggagggggtaccgtgtttatcaggccgccgtgcgcagagatggtatcggcttacccgcatcaggcagagcagtagcgcctcttctacggcggtatcttcgggggcgctggtgacaatctcgctaaacagccgctgcatcagtccgcgcagctgcgggtcctcgaccaccgggcgcaggagaatatcttcggcctttatcgccccctgaaattcagcggcaacccgctcgggatcgagatagatcatctgccagctgcgcgggccattcagcgggataccgtcgtgcatctcccccggattaaccataatgatatttccggcggcggcctcaattttgcccagatggctccacgaacgctgcgcgccctgagtgaaaatcccgatgccgaactggtcgtgggcatggcgcggaaaactctgttccgtgactaacgacatggcttccagtcccggcatggcgagccggtgctgctgaacgtgatgaaggcgagttttcaacggtttctcctgccggggcatagcatgagtgtagcctcaggcacgcgggacgagcaacggtccaccggcgcttgaatttcatcaacgcagaacataacatttagctaacattttgcctgctgcgctgccagcagattgcgcaaacagtggatgataatggatattaaacagcttaagtacctgattgcgctcgacagaacacgacatttcggccaggccgcggcggcctgccatatcacccagcccacgctatcgatgcgtatccgcaatcttgaagaagaacttaatctgacgctgattcagcgcgggcagcggtttgaagggtttaccccagagggtgagcgtattctggcctgggcgcgagcgctgctggcggcgcacgacgggctggaggcggaggcggctatctgtcgcgggcagatggtcggccagctaagagtcgggatggtgcctttagccagtctgaatccgatgcagctgattaagccgctggcggataaatacccggagctgcagttcagtctgctgtccatgacctcggaacagattatcgacggcgttagccgcaaccagctggatctggggatctgctatctgcaccacgtcgatagccaactgttcaacgtggtctggctgccgaatacccgcatggggctgctgcacgataggcgtcattatcagtttgccgacgcgacgcctgagtgggataccctggccgcgctgccgctgggctttctgaccaagggcatgtactaccgtgaatcgattgagatgagctttaaggccaaggggctggcgccaaaatacgtttttgaaagcgactccacgtttcagatcatccaggcggtgcaggccgggatctgctgtgcgattatgccgctgaacaacggcctcgaagcgctaagcgataatctggaaatcaggccgatccccgagacggaggtcgactcgatgctggcgctgatcatgcgcaacaaagagccagtgtcgtcgctggcggaaaaatgcttcgccgatgcgcaggtgatttttagcgaacgccagtcggctgacggcgcttagctggccatctgcgactggataaattcaagccagacgcgcgttctggcgggcataaagtggcgctcccgatagagggcggagagctgtaacggcgccggcggcagctccagcgtgacttcctggagttcaccgcgatcgataaacgggcggcagggtttctcccccagaatagcgaagccaacgccggcaagcgcggcatgcagcgccatttcgccgctgttgacgcgatagtgcccgttgacgttaacctttttaaagctaccgtccgccgcggcaaattgccaggcttgccccgcgagggcgctgacggtggtaatgcagggctgcgcggttaattgctcgctgtgtgtcggcatacccgttctggcaatcagctgcggagaagcgaccacgcagcagggaaacgaaaagagcgggcgcgcaatgacgctggcgtcttccattttgccgcgggtgataatcaccgcaatatccacatcctcttttaacacctccgttcccgccagattcgtggtacagctgacgattatttttggatagcgcatggcaaattgcgccatcagcggcgcaaacagcgaggggccaatttcgttcggaagacacaagcgtagcggcccttcgggttcggcctgctgctgcgtcagttcagcttccgtagcggcaagttgctccagcaccggtcgcatactggcgagcagcgtctgaccggcaggggtcagcttcatgtgccgggtactgcgctgtatcaggcgcagctgaaggctctcctcaagctgcgaaatctgtcggctcacgttcgatgagggcatctgcagcgcttttgctccggcgcgaaaggagccattttccgccacggtgacgaacacccgcagggcgttgagatccaattttttcactctcgattatcccgattttgataattaacaacgtcatttttaccgtcttatgcccggttttgccagacgctagactctccgcattacatagtcaggagtcttacatgcccggatatctggtacgaataacgttgatcatggcctttgttcaattcatcaacgccctcgaatatatgatttttaatcccttatttacctggatggcgccgacgtttcaggtgccggtaagccaggcgggttacgtcaccggcgtttatacgctggcttccgtcattgctggggtaagcgtctggcgatgggtcggtaacgttaaaccgcggcgctttttgctctgcaatatggccctgttggggggattaacgatgatgacgctgaccaccacccggtttgacggattgttgttctggcgttttcttgccggtctggttggcgggaccacaatgggcgtgggcagcagtctgttaatcaacattatgccgccgcacctgcgcccgcgggcattggcctccacgattgccgcattctcgctggtcagtattgtcggtatgccgacgatgctatttctcagtgcaaaaatcggctggcagatagcccccgcgacgatcggcggactctgcttaatcgcgttaccgctgataaaactggcgctgccggagcaacccatcgaggcgagccgtcaggcgggtttgcgctggtcgtcatcggtgctgttttacgcctccggcaacgcgctcgcgcagttcagtccgatgttaatcattccgctgctggtaccgttactgacggtgaaaatgggggccagcggcgatgaattgccgtggctctttttcggcggaggcgtggccggactatgcgcaactaaactcaccggcaagctatgccagcattacagcggctaccgcatcagcctgctggccagtctgctgtttatactgagcctgagcatcgcttttacctgcaaccgcggcggcgcactgtttatggtgctgtttctggccgccgcctactgtcgtctggtggcctcatcggctgtggcaatgcgttttccagcggatagcgccaggtccgggtttacgcttttacagaataccctgatgtcattaagtacggcggcggcctttctgctttcgtcgtgggtgctctcggttgacggcaacggcgagcgggcgacgcaggggatattgctgctctgcgccctgagcgcattgccgctgccgtggctgctgcgggttcaggagaaaagattagccacgcgcgccgccggctaacccggcggcggctaccgtcaaatattctccaggctgatcccgcgggttttcggaccaaagatgcccaccgacagcatcaccatcagcatactggcgacgataaagctaatcacgcctggggtaccggcgtattgcaaaataatgccgatcaaaatgctggtgatcgccgtcgacagccggctgaaggagtagcagaagccgaccgcccgcgcgcgaatgtgggtcgggaaaacttcggcctggtaggcgtgatagctaatggtcagccaggcgtttgaccaggtgatcataaacccgcaaatcaccagcagcaccgggctgttctgcagggcaaacagggtaccaaacaccaccgtcatcagcgcggaaagcacaatttgccatttgttttcaaaacgatgaacgaagcgggtgcagaacagacagccaatcggataggcgagggtaataaagaacgcgtacagcaggctgtgggtgatgctcgccccctgaccggaaagcagggccggtagccagttgccgaagccaaagaagccgatggcctggaagaagttcattaccatcagcatgatcgtacgtttgcggtactgcggcgcccagatcgctttaaagcttcccagcctgcgcgggttatcctgcgtctcaacctggtggcgcggcgagggagaaacgccgcagcgctgttccatttcgcacatcaccttatgggcttcctcgtggcggcctttttcatccagccagcgcgccgactccggcagcttcttgcggataacccagataatcagcgaacagagcgcgccgaagataatcacccagcgccagccggtcaggccgaaaagggtaatcggcaccagcagccacgacatcagcgccacggcggggaccgataaaaactgaataaagaaggcgaaagcgaaggctttattgcgcagatgcgtcggcacccattcgcttaaataggtgtcgatggtcaccagctcaatgccgagaccgacgccgaccagaaagcggcagaagataaccccttcggcgctgctttgcagggccatcatcatcgaaaatacgccgtaccaggcgagggcaaacataaacgtcaggcggcggcccagtttatccgccagcggcgcaagcaggctggcgccaataaacagccccataaaggtggacgacgcgaaggcggcctggtcggagataccgaagataccctgctcgccggtatggaaaatatcctctgccagcagcccggtactgatataaccggtctgaaaaagatcgtacagctcgaagaagccgcccagcgccaggagggtgataaaagaccacaggccaacggaggcgggcagcgcatcgatgcgagcggtcaggctggagtggggatgtcctggggaggcgaacgcggcgtcgcccagaacctgggtggtagacatattattattttcctcagataaaatgtttgcctgctaatgttatttgattgttaatggttttaaatttttaatcgcatcgggggagagagatttgcagaataaaataatgccaatgtggtttggctggcgttgtatgctggttttcgcctgtggcccggccgcggagtgaaggaattcaccatcgggccgcaaagtttgacctgaaataaatttaagataacgagagattgttgcgctcaggttattcacctacattcaaagcgagtactcccactcaggaaaataatcatgtctagcaagaaaattttacaagcagcgctggcggcggcgctttcgctgtcaatgatggccacgccggttttcgccaacccgggtaatggcaacggcggcggtaatcatgggaatagcggtaaccatggcaataacggtaacaacggcaatagcggtaaaaacaacgttgataagggcaaccagggtcataaagaaggaaatccggggcagagaaaaaactacggcaaacccgatcatgtctccgctgatatcagcttctccagagcgcgttcgctggcggtaaactacggtttaaccggctatcagtcgctgccgccgggaatcgccaaaaatctggctcgcggtaaacccttacctccggggattgcaaaaaaagcggttccggcatcgatgctcaacgaactgccttactatcctggctatgaatggcgcgtggtgggccaggatttggtgctgatcgcgctgagtacggcgatcgtgacgtcgataattaatggcgtctttgactagtgaattaaccccggttcgcgccggggtgaatcctggcgggcaggcttagcgcattaaggtcattctaaacaaatcgtcactaaagcgagattttaactttactcaaataattgaatgactataatgagcacaaattcacacaggagaaatatgttggacagtcacccttacttaaacatcaaggcaagctgacgctatttttcctgcgctgcttgccaaccggcgggcagcaatctcctcatccagacgattgcatcccataaaacataacgcagcatggctgcgaggataatcgtcatgttcatgtttaaaaatacattattccctccaccgtcaacgcgacgttaatcgcctctctggcgacaatttgtcgtgtgcttaataaagcacgtagttaattcttccagcaaaaatggaggaagctatgttgatgtttccttatatcgcaaatttactcgccgcgatgctgttgggcgcgctgattggcgccgaaagacagtggcgtcagcagatggctggcctgcgcaccaatgcgctggtcgccaccggcgcggcggtttttattctgagctctatctccacatcgccggatagtccgggacgtattgccgcgcaggtggtttccggaattggttttctcggcgccggggtcatcatgcgggaaggcatgaacgtgcgcggcctgaataccgcggcaaccctgtggtgctctgcggcgattggcgtactgtgtggcttaggccagttctggcaagcggcggcggcaacgctgatcatcctgtgcgccaatattctactgcgcgaagcggcgcagagaattaatcagatccccggcgcgacagaagaagaaaaatgctacgtcctgaatattatctgtcatagcgaacatgaaaacgcgattcgtcagctattgcttaatatcagtaaagagatgacgctcagcttgcaggggctggtgtcgatagcagcaaaagaacaaggacataaagaaatccgcatcgaactggttggtaataccgactcccgcaaagcgcgagatcttattatgtcaagaattggcggtgacgaaaacattacgtcagtgcgctggtgcgtcgaggggagttagcctccctgatattctactctggcaatgatttgtctaaggagggaatgatggatattcccaggcaattaaagtaataagcgtttaataacgtaaaaatgaattatgcataagtcaattatgcagggataacgacgtcttaaatttgaggaataatcatgactgacatgaaaatagaaaaccggaaaataaaccggtctgcgtcagaaaatgataagcagcataaaaaaagcttcgccattgaaaccgaggcatttaacagcccggatcatacgctggcgcggctcaacagcagccgtcaggggctcaccaccgaagatgtccttgaacggctgaatgaatatggccgcaatgaagtcgcgcacgagcaggcgccgccggcgctaatccagcttttgcaggcattcaataacccgtttatctatgtcctgatggcgctggccgccgtcagcttcgtgaccgattactggctaccgctgcgtaacggcgaagagaccgatctgaccgggattatcattatcgtcacgatggtcagcctgagcgggttattgcgtttctggcaggagtttcgcaccaacaaagcggcgcaggcgctgaaatccatggttcgcaccacggcgacggtgctgcgtcgcggtcctggtaacatggggccggcgcaggaggagattgccattgaggaactggtgcccggtgacatcatcttcctggctgcgggggatctggttccggcggatgtccgcctgctggagtcccgggacctgttcgtcagccagtcgatacttagcggcgaatcgctgccggtggaaaagtatgacgttctggccagcgtgtccggcaaagggtgcgacaggcttcccgaaccgaacaaagataaaagcctgctggagatgggcaatatctgtctgatgggcaccaacgtgaccagcggcagggcgcaggcggtggtggtggccaccggaaaccgcacctggtttggttcgctggcgaagtccattgtcggtacgcgcacccagacggcgttcgaccgtggggtaaacagcgtcagctggctgctgatccgttttatgctggtgatggtgccgattgtgctgctgattaacggcttcagcaaaggagactgggttgaggcatcgctgtttgccctggcggtcgcggtgggcctgacgccggaaatgctgccgatgatcgtcagctcaaacctggcgaaaggcgctatcgccatgtcgcggcgcaaagtgatcgtcaagcggctgaacgccattcagaactttggcgccatggacgtgctgtgcaccgataaaaccggcacgctgacgcaggacaatatcattcttgagcatcatcttgacgtcagcggcagcgagagcgaccgggtgctgacgctggcgtggctcaacagcagcagccagagcggggcgcgcaacctgatggaccgggcggtgctgcgctttggcgaggggcggattgcgccagcgaccaaagagcgcttcgtaaagcttgatgaactgccgtttgattttgtccgccgtcgggtctcggtgtcggtggaagatgtccgccacggcgataaaagcctgatctgcaaaggcgcggtcgaagagatgctgatggtggccacgcatctgcgcgaaggcgaccgcgtggttgcgctggatgaaacccgccgcgatctgctgttagccaaaacgcaggattacaacgcccagggtttccgcgtgctgctggtcgcgacctgcaagctggatgactccgccctgacaaccccgctgtgcgccgcggatgagcaggggctgacggtcgaagggatgctgaccttcctcgatccgccgaaggagagcgcgggaaaagcgattaccgcgctgcgcgataacggcgtggcggtcaaagtgttgaccggcgataacccggtggtcacggcgcgtatttgcctggaagtggggattgatgcccacggtatcctgaccggcgcacagattgaagcgatgacggataacgaactgcagcgcgaagtggaaacgcgttcggtattcgctaaactgacgccgctgcagaagtcgcgcatcctgaaaacgctgcagaaaaacggccacaccgtcggcttcctcggcgatggcatcaacgatgcgccggcgctgcgcgatgcggacgtcggaatttcggtcgacagcgcggcggatatcgccaaagaggcatccgatatcatcctgctggaaaaggatttgatggtgctggaagaaggggtgatcaaagggcgtgagacctttggcaatatcattaagtacctgaatatgaccgccagctctaacttcggcaacgtcttctcggtactggtggccagcgcgtttattccgtttctgccgatgctggcgattcatctgctgatccagaacctgatgtacgatctctctcagctctcgctgccgtgggacaagatggataaggaattcctgcgtaagccgcgcaagtgggatgcgaaaaatatcggccgctttatgctgtggattggcccgacgtcgtccatttttgatatcaccaccttcgcgctgatgtggtacgtgtttgcggcgaatcacgtcgaagcccaggcgctgttccagtccgggtggtttattgaagggctgctgtcgcaaacgctggtggtgcatatgctgagaacgcagaaaattccgtttatccagagtcgagcgacgttgccggtgctgctcaccaccgcggtcattatggcgatgggcatctacattccattctcgccgctgggggcgatggtcgggctggagccgctgccgctgagctacttcccgtggctgatcgcgacgctgctcagctactgcctggtcgcgcagggcatgaagcgtttctatatcaaacgctttggtcagtggttctgatgataaggaggcgcagagatgaatcgttctccggacaccctcatcgcgctgatatttttcctggtgggtctgctggtgctgttgctggctatctggcaaatcctgttctgaaaaagggggcgcgatgcgcagaggatcgctggataaagtctttattcaggtggcgattattgcggccatcattattctgctgacaatctggattagataagaggagcccgggccattggcccgggtttagcatttctgccggggaaaggattacagatcgaagcggtcgaggttcatcaccttggtccatgcggcaacgaagtcattcacgaacttctgccgcgcatcgctgcaggcatacacttcagccagggcgcgcaggacggagttggagccaaacaccaggtcaacgcgggtcgcggtatatttctcttcgccgctcttacggtcgcggccgataaacagctcagcgtgctcgtcagcggctttccagacggtacccatatcgagcaggttagcgaagaaatcattgctcaacacgcccacgcggtcggtaaacacgccttgtcggctgccgtcgaagttcgcgcccagcacgcgcagaccgcccaccagtaccgtcatttccggcgccgtcagcgttaactgctgcgctttatcaatcagcagcgtttcggtggagatgccgccgccaacgcgacgatagttgcggaaaccatcggccagcggctgcagcagatccatcgcttccacatcggtctgatcctgacgcgcatcgacgcggccaggggcgaagggaacgctaacctgaacgcccgccgccgcggcagcctgctcaatgcccaccacgccggccagaacgataatatcggccagcgacgctttaccggatgcctgctgaatcccctgcagggtcggcagcacgcgggacgcgatggcgtttaccggccaggatttctgcggttccagcgccagacgcgcgccgttggcgccgccgcgtttatcgccgccgcggaaggtggaggccgatgcccaggccacggaaaccagctcgctgaccgaaaggccggcgtcggcaatggcggttttcagcgtcgcgatatcctctgcggttggggtgtggaccgccgccggtagcggatcttgccagatcagatcttctttcggcacttccgggcccatgtagcgggacttcggccccatatcgcggtggataagtttaaaccatgcgcgggcaaaggcttcgttaaaggcctgcgggtcgttaaggaagcggcgggaaatcttgtcgaactccgggtcgaagcgcagcgtcaggtcggtgaccagcatggtcggcttgcgttttttgtccggattaaacgggtctggaataatttccgggccgtctttcgcttcgaactgaatcgcgcctgccgggctgcgggtttgcacccactcatatttgtacaggttttcgaagaagtagttgctccactgggtcggcgtttgcgtccagaccacttccagaccggaggtgatcgcgtcggcgcccgcgccgctgccgtagctgttcgcccagccgagtccctgcgcttcaatcggcgccgcttccggctctgcgccaacgtggctggtcaccgcggaaccgtgggttttgcccagcgtatgaccgccggcgatcagcgcgacgatctcttcatcattcattgccatattgccgaaggtcgcgcgaatcgcggaggcggcggagagcgggtcgccgctggcgttggggccttcagggttgacgtaaatcagccccatttcggtcgcgccaatggcctgctgattcaggctttccggatgacgatgggccagccattcggtttcgttaccccagtcgacgtccagatccggttcccaaacgtcttcacgaccggcaccgaagccaaacgtacggaaaccggcattttccagcgccacgttgcctgccagcatatagaggtcggcccaggagattttttgcccgtatttttgttttaccggccacagcaggcgacgggctttgtcgaggctgacgttatccggccaggagttgagcggtgcgaaacgctgctgaccgcggcccgcgccgccgcgcccgtcaacggtacgataggtaccggcgccgtgccacgccatacgaataaacagcccgatatagctaccccagtccgctggccaccactcctgagaatcggtgagcagggcgcgcagatcggccttcagggccgagtagtcgagcttcttaaactcttcgcggtagttaaagtgttcgcccagcgggtttgaacgattggagtgctgattcagcagatccacccgtagttgatttggccaccagtcgcggttgccggtgccaccgcccgcgctctgggtgggcgtcgccgtctcggcgtggaaagggcatttccctgccgacggggtattcgaaggatcgtttgacgtgctcatatcaggctccgtttgcttttgtgaatgccattacgatatacactgctaccaataagcgatatttgaatgagtctacggatttaatagttatttccgttcaatgcctttgtaaaaaccgaacatatatcattgctcaatgattgattgttcagtattgactcaaccacaatagtcgtaacatacgcgtaaaggaatcgttaagacatcatccccgccagcgaagagcgattgtttgagttacgacaattttagtgcgtaaaacggcttagcgctgccagtataaaggcgtaccaaaaacgtcgataaaatagtcaattaccgcacgtacgtttaacgaaggatggcgggcatgagggtagatcgccgacaccggcgaggagctggtgccgatcgccgcgctgtagtgaggcatcagctgaaccagccttccagcccccatggcttcattgaccatccaatcgggaaagagcaccacccccatgcctcccagcgcagcggtcagcagcgcatcggcgttatttgatgccagccgcggcgtttgcggatagtgaacccattctccctccgcgaggcggaacagccagcggttaggtccatttgaaccgctgtagaccagcgtgctgtgatggcgaagatcttccggtttctccggcgtgccgcagcgctgcagatagtccggagccgcaaccagatagtgatgctgcatacccagtactctggcatgaacgctggagtccggcaggctgccgatgcggaaaatcaggtcggtcgcttcgcggtgcggatcgataaaatcatcggtcagcgccagcgcaatttgcatctgtggatagcgctgcgttagccccggcagccacggcgcgatatggcgctggccaaaatagaccggggcgttgatccgcaccagtccacccggctcaagacgacggtcctgcaggtcgcgcctggcaacgctgaaccgttcgccgagccctctggcatgttcggcaaacaggcgtcccgcttcggtgggaaccaccgcccgggtattacgataaaagagctgctggccgagcgcatcctcaagctggtgaatgacgcgcgacaccatcgagggcgaaacgccttcccgcctcgccactacggagaaactctggctgtcatagacggcgataaacagctgtagcgcccgaaaattcacattacccgcatcgctcattaatgcaatatccgcaaaagtgtttccctgattgtatcgtttttcacattacttcgctgctttatgctctgccacccaatcaataatcggatatcaacgatgcagttattacttatttttcttgtgattgccggcggcatggggttatccgtggaagccggactactcgggccgcttgccggtcaggtaggggacctgtgggccaccttcagcatttttagcgtcgggagcgcgctaacctttctgctgatgctgctgtttggccccaggcagggcccctcgttcttctccttaccgggctggcagcttaccgggggcgtactggggcccatttacgtcgtcatcttaaccatcgccgtaccggttatcggtatcgccatgacgatgatcggcattctggccggtcaggtatgcaaaagcctgctgattgaccactacggtctgtttggttcggcaaaacgtaaaatcgatggacggcgggttatcgcgctgctgtttatcatcgtcgccctgattctgatcgctacaagctgaggagttaacatgagtagcataatgattttgctggcgctggtcggcggcgcgatgttgagtatgcaggcggcgattaacggccgtttgggcagccaggtgggcgtatttcgcagcgcgtttctcacgtttgcggtgggcgccttgatcacggcgctgctgattttttattttgccccccatcagtcgacaacgctgctggatgtgccgaaatggcagctgctgggcgcattttgcggggttccctatatcgtgattatggtggtggcggtgcagcgtatcggtaccgcgacggccacggtggcggtgatttttggccaactggccatgagtctgctgatcgataattttggctggctgggtaacgacgccattgccttttcagcggggcggctgggggccatcgtctgtctggggctggcgctgttctttatttaccgctccagcgcggcggcaaaagctgaagataaggagagttagcccacctgttcaggtgagttgtcgcgcatcgccaaccgcggtcatactgttcgtcaccctgtgactggcgctttagactggttactgtcggggagcatgggtatcgccgccgcgcgcctgggcatcacatcactttaccggagatacgctatgcctgagataccgtcgctgctgaccttcgcgcttgttgcccttggcctggtattgactccggggccgaatatgatctatctgatttcgcgctcgatttgccagggaagaagggccggactggtctccctcggcggggtggcgctggggtttgtgttttatatgctgtgcgccgcgttcggtattaccgcactgatcttcgccgttccctacgcttacgacgcgttgcgcatcagcggcgtggtctatctgctttatctggcctggcaggcggtgaagcccggcgggcgctcggtctttgcggtgcgcgacctgcctgccgatagcggccgtaagctgtttatgatgggctttattactaacctggcgaaccctaaaatcgccatcatgtatctctcactgctgccgcagtttatctcgcccggacacggcagtatccttgcgcagtcgctggtgctgggagggacgcaggcgctcattagcgtagcggttaatgcgctgattgtggtgatggccgggcaggtgtcgctgtttctcgcggggcgcccgttatggcagcagtttcagcgctggctgatggcgacggtgctggcggggatggcggtgaaaattgccttcgaggcgcggaagtaatcgctgcgcccggcggcgctacgctgccgggcgcaggggaatggctttaggcccctggccctatcagctgtgagcggatcgtcgcctccggcatcatctccagcaggccgttgctcagcatctctcccgcctcctgcagcgcgctaagcggcatttccggcaggctttcaagaataaaccacatccgcggactctccacgctcagacgagtacgtactccctgtcgccagttccagcgtcggcaggtcacgccgcgatcgtcgccccagaccacttctcccgcgtcgggatattcgtgaacgatctgcccctctttgacggtatcgaacggttcgctgccgtccgcgagcttgaggtgcggggcgccaacgtaagccgccaggttttcgccgccgaccggcacggcgtagcgcaggctcaccgcattatagagatcgacgatgggatcgatcgcagccatctcgccatcgcgcagcacccgcctgcgcaaggcttccgccgagcagggcgtccgcttgggttttgcgccaaaggcgcggaatacctcgttccaggcctgcaggtgcgcctccgcccactgcggctcgccggcgataaccgcctggcaggcggagcggagcgcatcggacccgaccaggggggcgcgtacggcggcggaaacgacatcaatgctcagggcgcgaaagccgggggccagcgcggagacctgcgggctgattgacggtaatacgctattcattggataatcctgtaacgaccattttaaagcataatatcgaccgatgaccaataaagtcaatataacgaccgacgcgggcgccgatgccgccatgattaatgaagccgttgcggcgcgcattaagcgctaccgggcggaaaagaagatctccctggatgagctgtcgcgacgcgcgggcgtcagcaaaggtatgctggtagacattgaagcctgcagggccaatcccagcattgcgctgttgtgccgtctggcctcggcgctgggcgtttccgtggccgattttgtcaatgtcgccacagcgccgccggtaaaggtgattgcagaaggcgagattcccacgctgtggcagggcgagcagggcggcaaggcgcggctccttgccggtaccagcggtccggatatggttgagctctggcagtggagcctcaatccgggagaaatgttcacatcgccggggcacggggaggggacgactgagctgcttttcgtgaccgagggcgccttaaccctgacggttaacgacggggtctatctgattcgagagggggattccgccgtcgcgcgtaccgacgccccgcatagctacgctaacgccggggataagatcgcgcgattcaccatgacggtgagcgaaaaagcgcgctagcaagtgtttcccggcgagcggctatcgtcccgaccgctcgccgccttcacgccatacgcaccaaatccatgcaatgccccatcatcactccccatttttgggagccgcggcggcgcctgccgtcgtagggctgattttacgcgcgctgcgcgcctggcatagaccttgcacactcctgttcagaaggcagcgcaacagacaattgagataacacaatagctggctagggttccggttcactcaggtgaacgtctggtccgagagctggcgacctctgcgaggttacacggcgggacaaaagcccgggagacagcagcaccgttgggtgtcgcgctgcccccgtttctcgtgctaaccagaggtccaccatgaagacaccgccgatcctccgctctcttatcctgtcgctggcgctactggccagcgtcccttcgtttgccgccgtcaaaaaagagttcaacatctgctggactatctatgccggatggatgccctggggcaccatcagcaacgaaaaaatcatcgataaatgggccggtaaatacggcatcaaaatcaatatcgttcagcttaacgactacatcgaatccattaaccagtacaccgcgggccagtttgacggctgcaccatgaccaacatggatgccctgaccattccggcggcggggggcgtagataccacggcgctcattaccggcagctactccgacggcaacgacggcgtggtgctgaagggggcggataaaaagctcagcgatctgaaaggcatggcggtgtatctcccggagctttcggtatcgcactacctgctggttcgcggtctggaaaaagccgggctgcaggaaaaagacgtcaaagtggtcaatacctcggatgcggatatcgtctcggcttttggcaccagcggcgtacgcgcggcggtggcctggaatccacagctttcggttatcaaaaagacaccgcaaaccacggaggtctttagctcttcgcaggtgcccggcgagctgatcgacatgatggtggtgaatactcagaccctgaaagataacccggcgctgggtaaagccctgaccggcgcctggttcgagatgatggccaaaatgcaggccggagatacgcaggcgctaagcgcaatggccgccgattccggcaccgacctcgcgggctaccgggcgcagctaaaaacaacccatctcttctggacgcctgccgataccctgacgtttatctcctcgccggcgctggcaaaaaccatgcagcgggtagcgcagttctcttttgacaaagggctgctgggagagggagcgcagagcgctgactttatcggcatgaccttccccgacggcgtcaccgtcggcgataccgccaacagcaagctgcgctttgatgacagctatctgaagctggccgcggcggggcagctgtaatgattgaccttgggagtccacgccatgcgccacattaaccgctatccccggcagggtatgcgcctgacgctgatgctattgcccttcgtcctgatgatcgccgcctggtttatcggttcggcggtgcggctggaagccaacccgcaggataagctgctgcccggcctgtcgcagatgatcgcggccatcgatcggatggccttcaccccggataaacgcagcggcgagtatctgctgtgggccgacacgctgattagtatgagccgcctgctgattggtctggcgctctcgtcgctgattggcctgggcatcggcatcgccgccggcgtgttcccgatgtaccgcgcggcgctgtcgccgctgatgaccgtggtgtcgatgatcccgccgctggcgatcctgccggtgctgtttatcgtcttcggcctggatgagctatcaaaagtgatgcttatcgttattggcattacgccgatgctggcgcgcgaccttgaacagcgggcgcgggaaatcccggcggagctgtttatcaaagcgcaaaccctaggcgccaatagctggacggtggtgctgcgggtagtgctgccgcagctgctgtcgcggctgataacctccctgcgcctgctgctgggctccgcatggctgtttttgatctccgccgaggccatttccgccaccgccggtctcggctatcgcatattcctcgtccgccgctatatggcgatggatgtgattattccttacgtcatctggataaccctgctggcatggctgatggatctggcgctgcgtcagctgcacaaagcctgtttcccgtgggcgaaaggaggccgggcatgagctttatcgacatcaaaaatatctggcaggagtacggcgaccacgtggtgctggagcgcatcaatttgcaggtgaaagagggcgagttctgttcgatggtcggcgcgtccggctgcgggaagtcgacgtttttacgcctgctgctcggccaggaaaagccgactcgcggggaaatcaccctcgacggccagccgctggcggcggagccggaccgcagccgcggcgtggtgtttcagcgttattcggttttcccgcacctcaacgtgctggataacgtcgccattggcctcgaactcccggcgtcaccgctgtttggccggctgtttgccggcaggaaacgcgacgcgcgcgaacgggcgcagcggatgctggagaaagtcgggctggggcacgcgctgaataaatatccggcgcagctctccggcgggatgcagcagcggctggcgatcgcccaggctttcgtcatgcagccgcgcgtactgctgcttgatgaacccttcggcgcgctggatcccggtattcgcaaggatatgcacgggctgctgctccagctgtggagcgaaacgcggatgacggtttttatggtcacccatgacctcgcggagggcttcaaccttggcacccggctgctggttttcgacaaagtgcgcatcgatccgcaggcgcccaacgcctggggtgcgcgcgttacctacgatattccgctcaatgaagcgcggatgtcgcagataaccaccggcagcgacaataacgtttacgcattaaggagatagtttgatgaccgcactttttcactcatcccccagcctgcgcgaagagcggctacccggcggggcgcacacctcgttgattttgcgcaaagggcagattctgcgcctgaccgatatcgacggcggagccaacgtcagcatgatgatgctgaatccctatgagaagagtgagcgcctgaatctgccggataccctcaaggggcagcacaccgcgcgcctgaccgccgggcactgtttctactccgatatggggcgcgttctggccgggattgttgccgacagctgcggctggcacgacccgttcggcgggatactcaacgccgacgagacgcgtgaaaaatatggcgcaggacgctaccaggagctgcgcaatggcttctaccgcaacggcgtcgataacctgctggttgaaatgggtaaatgggatctgggcctggaggacctgctgatggtggttaacttcttcagcaaagtcacggtcgatgaggatggccgttttcagtttatttccgccaacagccgcgccggagattacgttgagctgtttgcgccgatggatgtcctcatggtgctgaccgcgctgccgcatcctcaggaccctgccgctgagtacgctccgcggccgatccagctgagctggtaccaggctgacgatgcgcaggcggccgcggaagcgctctttacccgcgatgaaaaccagcgcgcgttcctcaacacccaactttttgccctgtaaggaggctgcgatgaccctgatcgccagtaaccgtcgtcccgaagatgccgtctatcgccatgtgatcccggcaggggaaccctggctgtttgaggtacaaaaagggcagaccctgcgcctgcttgacctcgaaggcaaccaggccattgataccctgttttacaacgccgataacccccgagaacgctacgatccgcagcgcacgctgcgccgccagggcaatgcctacctgactaccggcagcgtactctattccaatctgggcaatccgctgctgaccatcgttgccgacacctgcggtcgccacgataccctcggcggcgcctgtgcccaggagagcaacaccgtgcgctacgcccaggataaacgctatatgcacagctgtcgggataatttcctctgcgcctgcctgcacgatggccgcctgcataagcgcgatatcggcgccaacattaacttttttatgaacgtcccggtgacgccggaaggcggtctgacctttgaggacgggatatcggcggcggggaaatacgttgagctgcgcgccgagtgcaacgccgtggtgctgatttccaactgtccgcagttaaataatccctgcaatggctggaaccccacgcccgccgaggtgctggtatggaactgacccgctggcagcgctggcgtctgctggcctttcggctcttcgccgtccgcgccgaccgcctgaacagtacgccgacgcgcaaaccttaagcgccggttcaccccggggacgacctcaggggaacatcgactttttgcgggacgacccgcgaccctgtgagttgcgcttatgtttgataccttactgattgccaaccgcggcgccatcgcctgccgcattctgcgcaccctgcgcgcgatgcaggtgaagggcgtcgccgtctattccgaagccgacctgagtagtctgcatatccgcgacgcggatgaagcgttaagcctcggcgacggcccggcggcgcaaacctatctggtgacggagaagatcattgccgccgcgcagcagagcggcgccaaagcgatccaccccggctacggctttctgtctgaaaacgcggccttcgccgaggcctgcgaggcggcgggggtggcgtttgtcggccccactccgcaacagctgcgcaccttcggcctgaagcataccgctcgggccttagccaaagccgagggcgtgccgctgctggaaggcagcgagctgctggccgacagcggcgaagcctgccgggcggctgaggcggtgggctatccggtcatgctcaaaagcaccgccggcggcggcgggattggcatgcgcgtctgtcgcgacgcccgtgagctgattgaggcgtttgccgcggtgcagcggctgggacaaaacaacttcagcgacggcggggtatttctcgaaaaatatatcgaacgcgcccgccatctggaggtacaaatcttcggcgacgggcggggagaggtcatcgcgctcggcgtgcgcgactgttcagtccagcggcgtaaccagaaagtgattgaagagacgcccgcgccgaatctgcctgacgggatggcgcaggcgctatgcgcggcggctatcgcgttgggtaaagcggtgagctaccgcagcgccgggacggtggagtttgtctacgacagcgcggcgcggcagttttatttcctcgaggtaaatacccggcttcaggtcgaacacggcgtcacggagcaggtgtggggcgttgacctggtgcgctggatgattgagctggcggcgggggaactgcctccgctacctgagctggccgccgggttacggccccagggccacgctatccaggcgcgaatttacgccgaagatccggggcggcaattccagccttctcccggactgttaacggacgtcttctttccgccggcggacggcgctgccctgcgtattgaccgctgggtggaagccgggtgcgaagtcccgccgttcttcgacccgatgctggcgaaagcgatcgcctggcgccccagccgcgatgaggctattgccggcctggcgcaggcgctggcggagacccgcctgtacggcgtagaaactaaccgcgtgtacttgcaacaaattcttggctttgcgccctttaccgaaggcgagccctggacccgctgccttgagcagctgcgctaccgcgcggcgaccgtagaggtgctgagcgccggaacccagaccagcgtgcaggactatccgggacgtttggggtactgggcggtgggcgtaccgccgtcgggaccgatggacgatcgcgccctgcgtctcggcaaccgcctgctgggcaatgccgagggagcggccgcgctggaaatcaccctcaacgggccgaccctgaaatttaataccgacgttcaggcggtggtgtgcggcgcgccattggcggtgacgctcgatggcgtagaccagccgctggactgcgtattgactattccggcgggggcgaccctgaagctgggcgcgataagcggcgcgggggtcagaagctatctctgcctgagcggcggcattcaggtaccggactatctggggagtaaaagcacctttaccctcggccagtttggcggccacggcggacgggcgctgcgcggaggcgacgtgctgcatctggcgccgcacgccgccgccagaagcggggatcaactacccgccgcgctacgcacggcgctggctgaggtgcggacgctgcgggtgatttacggcccccacggcgcgccggaattctttgcgccggaatatattgcgacgtttttcgccacggagtgggaggtccactttaactccagccgcaccggcgtgcgcctgattggccccaagccgctgtgggcccgcgacagcggcggcgaagcggggctgcatccgtcgaatattcacgataacccttacgcggtgggcgcggtcgattttaccggcgatatgccggtgatccttggaccggacgggccgagcctcggcggttttgtctgcccggtaacggtgattgaagccgacctctggcagttaggccagctcaaggccggggataaagtgcgtttcgtggcggtggatttacccaccgcccggcggctggcggaaggacggcgcgccgagctggcgaccctaagtcaccaggcgatagcctggcagcccgcgccgctgacgtcgcctgtcgtgatgacctgcggcgaggcggacaaacgcctggtggcgcgactctccggcgacacgcatctgctgctggaagccggggagccggagctggatctggttctgcgtttccgcattcacgccctgatgcaggctctggaagcgcaatcaagggaaggcgcgatcgatatcaccccggggattcgctcgctgcaaatccattttcagccggaaacgttgccccttgagacgctgctggcgtgggtgcgcggcgagtggtccacggtctgcctgagcgacgatctgcaggtgccgacgcgcgtggtgcatctgccgctctcctgggacgatccggcctgccgcagggcaatcgataaatatatgaccaccgtgcgccaggacgcgccctggtgcccgagtaatctggaatttatccgtcgcatcaacgatctgcccgatgaacaggcggtatggaatacggtatttgacgccagctatctggtgatggggctgggcgatgtttatctcggcgcgccggtggcgacgccgcttgacccgcgccatcgcctggttaccaccaagtacaacccggcgcgcacctggacggcggaaaactcggtcggcatcggcggggcctatctgtgcgtctacggcatggaggggcccggcggctatcagttcgttggccggaccctgcagatgtggaatcgctatcgcgaggtagcggattttgccggcaaaccctggctgctgcgtttcttcgaccaactgcgtttctatccggtttcggccgaagagctgctgcaaattcgccgcgatttcccgctcggacgctacccgctgcgcattgagcacagcacgctgcggctggcggaataccagcagtttctccgccgtgaagcgcacagcatcggcgcgtttcgcgagcatcagcagcaggcgtttaacgccgaacgcgatcgctggatagccagcgggcaggcccattttgacagccaggagagcgccgtggatgagggcggagacgcgccgctgcggcagggtgaacagggggtggaaagcccgatttccggaaacctgtggcaagtacaaacggcggcaggcagccgggtccgcgcgggggatgtgctggtcgtgctggagtcgatgaagatggagatcccgctgctggccccctgcgatggcgttattcaacaggttcacgtgcagccgggcagcgcggtacgcgccgggcagcgggtggcggtgattattgaggagaaggcatgatgcagcagacctttgatttacgcctggcaaccctggcggagcgttaccgcaccggtaaaaccacaccgcgcagcgtgctggcggacatccgccagcgggcgcaggcgcttaaccccgagttccggttgtttatccatattctgagcgaagaggagcaggagccgtttctggcggcgctggatgacctctcgccggccgcgctgccgctgtacggcgtgccgttcgccatcaaagacaatatcgatctggcggagattgtcaccaccgcggcctgtccggcgtttgcgtatcgggcggatcagagtgcgacgattgtcgctcagctgattgcgctgggcgccgtgccggtcggtaaaaccaatctcgatcagttcgctaccggcctgaacggtacccgatcgccctacggtcgctgccgcaatagctatcatgcggagtatccctccggcggttccagcgccggttccgcgctggcggtggcgctgggcgttgccagcttctcgttgggcacggataccgccggtagcggccgcgtcccggcagggctgaataacctggtgggtctgaaggccagtaaagggctgatatccaccgcaggggtggtccccgcctgtcgtacgttagactgcgtgacctttttcagccccaccgccgacgaggccagccagctgctggcgctcgtcgcacagtgcgatccgcaggacgcctggagccgccgtaatcctcagtggaacagccgtcaggcgttcggcaggccgtccgcggggtttcgttttggcgttccgcgcgagctcaatttcctcggctgccgcgcaagcgaacgcctgttttcccaggcccggcaacggctgacggcgctgggcggggtggcagttgagattgatttcacgccgtttctggcggcagcccggctgctgtatgacgggccgtgggtcgccgaacgctacgcggtggtcggcccgctgatggcgcggcagccggaggcggtactgccggttattcgcgacgtgctggcaaaagcgccgggcaccgacgccacggcgacctttacggcgatctatcagctacagcagtacaaagcccggtgcgacgcgatactcgagaccctggactgcgtgctgacgccaacctatccgcgcccggtgacgcttgacgagctggaggcggagccgatcgcgcgcaacgccgatctcgggtactacaccaactttatgaacctgctggactatgccgcggtgagcgtgccatgcggatttatgccggacggattgccttcgggcgtcacgctgtttggccgggcctttaccgaccagtatttactgggcctggccgatgcgtttcagcgcgctgagcggctgccgctggcgggcggagcgcggctggagaccccgccgcctgaacgcgtcgccggccatgaccgaatggcgctggttgtttgcggcgctcatctctctggcctgccgcttaacggccagctgctggcgcggggcggtcggctgctgcaggcgacccgcagcgcgccgcactatcgtttatacgctctcgcggacggcaaacgcccggcgatggttcgcgccgatagcggcggggcgtcgatcgcggttgaagtgtgggagctacccagcgcggaggtcggttcgctgctggcggccatccccgcgccgctgggtctgggaaaagttgagcttgccgacggacgtcggttagcgggctttatctgcgaagccaacggattaggcgaagccacggagattaccgcctacggcggctggcgcgcctggctggcacgttaaactacaacccctccatcgctttttgatggaggggattggtgacactgtcaccttaaatttctaacatgctgaaacatttctgccagatcattagcaacctttcggtagggctcccgctgcgataacgctattcttccccgcttttcccttttcaggcactttgtaacccaggtaaatgaccgctaatgtccctaatgagagatgaaattcgcgaccattcagcggaaaagatgctatttgtccgccgtgccgtcattgcgtttctactggtggtgatttgcttcgccatcctgatccttaatctttaccgcctgcaggtggatcagcacgacttttatcagacgcgttcaaaccagaacgacattaaaatgctgcccatcgcgccgagccgggggctaattttcgaccgcaacggcatcccactggtacaaaatattaccctctaccgtttgcaggtgatcccgagcaaaatcgccgatatgacggcgctgctgcagcagctgacgccgatcgttgatttaaccccgcaggatatcgccgacttccgcgacgatatgcaccacaacagccgctacaaagaggtgacgttaaaatcggacctgagcgatgttgaagtagcgcgttttgcggtcaatgagtttcacttccccggcgtcacggtggaaagctatcagcagcgcgcttacccctacggcgccgaactggcgcacgtggttggctatgtctcgaagatcaacgacagcgatctgcaaaagctggccaaagccggggaagaagagaactacgccgccgaccataatatcggtaagcagggcattgaaggctactacgagaaagcgctgcacggcaccaccggctatcaggaagtggaagtggataaccacgggcgggtcgtgcgtctgctaaaagaggtcccgccggtggccgggaagaacatctacctgacgctggatctgcacctgcagcagtatatcgaatcggtgctgaaggggcagcgcgcggcggtggtggccgtcgatccgcgcgatggcggcgtgctggccatggtgtcgagccccagctacgatcccaatccctttgtcaggggcatcggctatcaggcctaccgttcgctgctcgataacccggaccggccgctgattaaccgggtcacccagggcctctatccacccgcgtcgacggtgaagccctacatggcgctgtcggcgctgtcggcgggcgtaatcacgccaaccacctccttcttcggcgcgccgacctggacgctgccagggacccagcgccgctaccgcgactggctgaagagcggccacggcatgcttaacgtcaccaaagcgatagaagaatcggcggatactttcttctatcaggtggcgtttgagatgggtatcgaccgcattcacgagtggctaagcaagtttggctacggtcagtctaccggcatcgatcttaacgaagagtatgccggggtgctgccgagccgggagtggaaacagcgggtgcataaaaaaccgtggtatcagggggataccatttccgtcggtatcggtcagggctactggattgccacgccgatccagatggtcaaggcgctgacgaccctgattaacaacggcaaagtgcaaaatccgcatctgctttactccatgaagcagggtaataaggtcgagcgctatcagccgccgcaggatctgccgcaggttggcgatccgcattcgccctactggggcgtggtgcgcaacggcatgtacggcatggcgaacctgccaaacggcaccggctataagctgttccataccgcgccgtaccagatcgccgcaaaatccgggacgtcccaggtcttcagcctgaaggagaaccagacctacaacgcgaagatgatcccggtgcgcctgcgcgaccatatcttctataccctgtttgccccctatcagcatccgaaggtggcgatggcgctgattctggagaacggcggcggcgatggcgtggttgcgggaccgacggcgcgcgccatcctcgaccatatcttcgacccggccaatgcgccggcggaacagggcgcgacgtcgacggtgccgcaggtggagagcgccgacgcgcagtaaacgttattcactctgagcataagcgttagcggattggttatttgccgccgccggcgcttttgctcatagtagcgttctgtgttgctgtgaaaaaaggcgctctgatgtcgttaagccgaaatacgcttcttcttgtacaaaccgggactccgccggatgaaatcgtctccgaccacggcgatcttcccctctggtttggcaatttactggcgccgtggcgcaataaaatcagcgtggcgcgcgtctatgccggagagccgcttcccgcgccggataacgcgaccatcgcggtgattaccggctcctgggatatggtgaccgaacgcctgccgtggagtgaaatgaccgcggcctggatccgcgaggcgatggcgatagagatgccgctgtttggcgtctgctacgggcatcagctgatggcgcacgccctggggggtgaggtggactaccatccagccggacgcgaagccgggagtaaaaccatttcgctgtccgcacacggcctggcggatcgtctgctggctgaccacccggcgccgttcagcgcgcacctcacgcatatgcaaacggtcacccgattaccgccaggggcaaaggtgctggcttcgtcgcagcacgaccctcaccagattgtacgctacggcgcgcatgccgtttctacgcagtttcatccggagatcaccccggcgattgcccgctcgctgatcgcgttccgccaggcggcgctgcgcaacgagggggttgacccggacaggctgagtcgtgacgttgtggagagcccggtggcctcggcgattctgacccgctttgtcgcaggctacctgcagccagacctgaacccggcttaacctcagcgctgtttttccgcgagccaggccgccgtttcaccgaggatttcgtcggaaaacgctgcatccgcggtcatccgcgccagaattaacgcgccgaccatggccgaccagctgccaatcgccgcgcggcggctggcttgagcgtcccgatcatccatcgcttcactgagctgcgctatctgctgctgcagccgtgcgctcatttcgtcacgcgcgggttcggactggcggatggtttccgccgccagcgccgccagcgggcagccgctggcaaaattatcccgatgttcgggggaaagataacgctcgatttgcgcgacgacgtcgtttttcgccgcgtcgttctctatcttcagttccgcgagggtttgggcgatcaggtcatccttcgatttgaagtagccgtagaatccgccgtgggtcagaccggctgatttcataatatcggtgaccgtgaccgcgtcaaaaccccgctcgcgaaacaaccgcccggcggcggtcaggattgtctgcttattctcttcaacctgttttctgctcactctcatggcgtcgtcctgctgcgaaattatttatgatgaccatcatataacattatttacagcatacccagcccgtgccattatacatgacgatcatcatgtataaattgaggagtacacctatgagcagtgaatcagcggtgctggtaaccggcgcatcgaccggaatcggcgcagtctatgccgaacgttttgcccgccgcggccacgacctggtgctggtcgcgcgtaatcacgagcggctgacggcgctggccgagcggctgcgcgacgaaaccggcgttcaggtcgacatcctgcaggccgacttaacccaggatagcgacatcgccgccgtggagcagcggctgcgggaagacgcgcgtatcaggattctggtcaacaatgccggcacctcgattcccggtgatttcctccaccagagcagtgacgatatcactcgcctgattaccctcaacgtgacctctgtggctcgcctggcgaacgcgatcgcgccgcgtctggccgaggccggagagggggcgattgtcaacattgcgtcggtcgttgggctgggtccggaaatggggttgaccgtctacggcgccacgaaagcctttgtgctgtttctctcgcaggggctcgacgttgagctgagcgcgaaaggcgtatacgttcaggcggtactgccggcggcaacgcgcaccgagatttggcagcacagcggcaaagacgtggataccattcccggcgtcatggaggtggataaactggtggatgccgccctggtggggttcgaccgcagcgaatcggtgaccataccgccgctgcatgatgaaacgcagtggcaggcgctgaacgcgacgcgtcaggccatgctccccggctttgcgcaatctgaacccgcggcccgttacctgtcgcgatcgtgagtttgtcgcaccgtgtatcggaaaggagagtcgatacacggtgcgacaacatcccgccatgtcacgcccggcacggatacagtgcctctggaaggcagtgctgcgcacagccatcatcgggccggtagcccggcgccgcccccgggagaagagcgctgagtggcagaatacccggaggcggtgctgcgcacctgtctgggctacaggttcacagccatcttcaggccggtagcctcaatatcgtgacaacgtcacaaattcagggcaaaaaaccaataaaaaagccgataaggtgagttatcggctttcaaggttaatgcgaaaacaaatttactgcgccagcagctcctgggcggtacgctctaccagactcagcagcaccttcacgtcctctaacgtcacgatcgggttcagcagcgtcagcttcagacaggtgacgccgtcgtgctcggtcacgccgacgttagcgcgaccggaagccagcagcgcatcgccaacccgctggttgagcagggcgatcgcggcatcgtcgctgcccgccatctgctgcggacgggaacggaacagcacgctcgccagctgcggctgcatgaccagctccagcgtcggctgcgttttgacgtaatccgccacgttcagcgccatcgtcacgccgtgatcgatgatttccgcgtactgcttctggcccagcgcctccaggcccatccacagcttcagcgcgtcgaagcggcgggtggtctgcagcgatttggataccaggttcggtacgccgtgctcttcatcaaactcagagttcagataggccgcttgatagcgcatcagctcatagtgacgggcttcttttaacagaaacgcgccgcagctgatggtctggaagaactgcttatggaaatccagggtgatggagtccactaagtcaatgccgtccagacgatcgcgatacttctcggacatcagcagcgcgccgccccaggccgcgtcaacgtgcagccagatctggtgctcagccgcgacggccgcaatctcgcgcagcgggtcgattgcccccgcgtcggtggtgccggcggtggcgacgatggccataatctgttcgccgttagcctgcgcctcggcgattttcgctttcagatccgccacgtccatccgcgcgaattcgtcggttttcaccagcgtcacggaacggtagccgaggcccatcagcgccatgttcttctgcaccgagaagtgggcgttttctgaacacagcactttgtactgacgaatatcgcccggcaaaccatcctgctggatggaatgaccccggcgggcaaagaaggcatcgcgcgccagcatcaggcccatcatgttactctgggtaccgccgctggtgaaaacgcccgcatcgccggcgccgtagccgacttgagcgcgcagccattcaatcagcttgatctcgatgatggtggctgacgggctttggtcccaggagtccatgctctggttggtggcgttaatcagcacttccgccgcctggctaatcaccaggctcgggcagtgcagatgcgccacgcactgcgggtgatgtaccgacaggctgtctttaaggaagtactcgatcgcacgttcaatcgccgcctggttgcccagaccctgttcgttgaaatcaagggtgatgcgctcacgcagttcgtcaacgcttttcccctgatacatttcaggctgctgcagccactgcgctaccgcctggctggtctgggcgatcgcttgctggtaggcatcaatactttgcgcggaaccagcaagaatcggattcaacttggacattgcggtcacttactccactcagaccggttttacgccggcggccagcagggcctgttcaaatttgtcgaagaaaatttccagctcagcgttgctgatcagcagggacggcagcagacgcagcacgcagccgtggcggccgccgcgctcgaggatcagacccgcttcgaagcatttcttctgcagcagcgcggaaagttcgccatccgccgggtagcagcccatgtggtccggcgcttcgttcggtttaacgatctcgatgccgatcatcaggcccagaccgcgaacgtggccgataaccggatagcgtttctgcatctcggccagcttgcctttcagccattcgccctgagcggcggttttatccgcaatgttattgtctttcaggtggcgcagggtagtcaggccggtggccatcgccagctggttgccgcggaaggtgccggtatggtgacccggttcccaggcgtcgaactgctttttgataccgagaacggccagcggcagaccgccgccaacggctttcgacatcacgataatgtccggctcgatgcccgcgtgttcgaaggcgaagaatttaccggtacgcgcaaagccagcctgaacttcatcgatgatcagcagaatgccgtgttcctgagtcactttacggatgcgctgcagccactcgaccggagccgggttcacgccgccttcaccctgaacggcttccaggatcaccgccgccggtttacgcacgccgctttcgacgtcattgatcaggttttcgaagtagtaagtcagcgctttcacgccggcttcaccgccgatacccagcgggcagcggtactggtgcgggtaaggcataaactgcacttccggcatcatgccgttaaccgccgcttttggcgacaggttgccggtgacggacagcgcgccgtgggtcatcccatggtagccgccggagaagctgatcacggaagaacggccggtgtattttttcgccagcttcagcgccgcttccacggcgtcagcgccggacggaccggtgaactgcaggcagtattctttgccttcgcccggcagcagggaaagcaggtattcagagaagcgatcttttaacggagtggtcagatcgagagtatgtaacggcaagccgctggtaatgacactttggatgctctgcagcacatcagggtggttgtggccgagtgccagagtacctgcgccggcaaggcagtccagatactgtttattatccgcatcggtcagccagacgccttccgctttggtaatcgcaaggggcagcttgcgcgggtagctcctgacattcgattcgaattcagcctgacgggccaaaaaggtatcgttgtttgcatctaataaatctgcgcctaaagtatcaatacggactttatccgtcatcatatcactcccacaaccagcgttacggttgagcgctggttgaataaattggtgtaagaaattgaatcgccatgcattaaagcgggcacaatatatggctttttagatacgcattcaacgttttattgattaaggtatatttacgttatttttacacaggcaaaaaccaacgtaatcccttgatttaaatcaggtgttttaaaggataaaagacctttaaaattgtaattattagtgaggaagtttctcgttttttaatactgccgcgcggccattgctggcgaaaagtttccgccagcaatggcatgactcaatgcagctcaaccgcataattcgttaaaggtgtaacttttttcaccaacttattgttatataaaaactgttcataagcttcataccgtggtttatccagcgccgccggatcgctggcaaacagaggaagggttttcagccatgcctgcttgttcagttcggtgttgagctcgggatgcgcggcggcaaacgcctgccaggtctcctgcgggtgagcgcgcaggtaagcgacgcctttttgcagcgccttgaggaaggccctgattttcgccgcgtggacttcatcccggttggcgacaatcaccagctcgtcgtaggccggtacgccgtaatcctcaacgttcatcacctgcggatctttcccctgcagcttcagctccagcgcttcgatattacgatagccgccaatgaccgcgtcgacctgtccggccagcagggcgctggtcagctggaagttaacattgatgagcttgatgcttttgggatcgattttcgcatgctgcgccatggtggccagcgtcgcctgttcgatgccgctcaccgaataccctacttttttgccctgcagatcggcgggagattttatgcttttatccagcgcgatcaccgtattcagcggcgaattaatcagcgtgccgacgcggaccagcggcagcccttcatcagcaaaaaaatgcacctgcggctggtaggtaatcgccaggtccgcctggcgggcggcgaccagccgcggcggcagcgccgggtcggacggcggcacaatgttgacgtccagccccgcgtctttaaaggcgccaatctgttcggccaccaggatcggcgcgtggtcgggattgatataccagtccagcaccagggtgagtttctcgttggccagcgcctgaccgctgaacagcgcggcaatcgtcataccggcataaacacgtttacgcatggttagtccttttatttaagagcgttattccggcgtccagttaatcagccggtgtaagaaagcatccaccgccagccagagcaggacggtcagtagcaccagaataaacagggccgcaaagcagatatcggtttgcagacgggcgttggcgttaagcatcacgtagcccaatccttcggctgaaccgacccattcgccgatgatcgccccgatgggggcgacggcggccgccatccgcaggccggaaccgagggctggaagggcagccatcaggcgaacgtggcgcagctgcgcgccaaaagaggcccccatcgtgcgcgccagatcgagatagtcgtggttaacccggcgcagaccgtcgaaaaacgccgaggtgacgggaaagaaaatcaccagcaccgccatcatgaccttggcgctcatgccgaaaccgaaccacagcaccagcagcggggcaagggcgaaaaccgggatcgcctgactggtcagcaccagcggcatcagccagcgctgaaggcgaggcgagacaatcatgcacagcgccaggatcacgccgagcagaacgccgagcgtgaggccgctgaggatctcgcttaatgtgatcagcgtgtgttcgccgaggtacgcgcggttgacccacagagcgcttgctaccgccgcgggggaaggcagcaggaaagcgggaatgccgctgcgggtcgccagccaccagagcagcagcaggccgcagaacaccacggcggcgcgaaacagttttgcgctcatccgttagcccttatgagctgttgcagcagctccgcctggctggccaacagcgccgggtcgtccggcgcgcgcggcggcatgccggagaggtgatgcccgtcgtcaatcccgccgggagcgggggaaaggaccagcagacggtggctcaggcggcaggcttccatcgggtcgtgggtgatcagcacgacggtgcggtttaccagcagcccggcggccagggtctgaatgcgcgtgcgggtaatcgtgtcgagcgcggaaaagggctcgtccatcagcacgatgggccggtcttcgtagagcgtacgcgccagcgccgcacgctggcgcatgccgcctgagagggcggccgggcggtcgccggcgcagtgttcaaggccaacctgctgtaacagcgcggcaacccgccgatggtctacgcgctccccgcgcagacgcgcgccaagcgagacgttgtcgcgcacgcttaaccacggatacagcagatctttttgccccatccacgccagccgcttgtctattggctgcccgtcgctggcgcgaacctcaccggcggtggcttttgccagcccggcgataatacgcagcaggctggtctttccggcgccgctggcccccagcagcgatacccactggccgccggggatagtgaacgtcagattgtcgaagatctgccgcgagccaaagcgcaggcccaggccgtgcacctcaattccgggagccgtcacgccgggcgctccgtgacggcgttaaggcccatctgccagaagttagcctccagacgcgtggcggtggtgaaaatagcgctgagttcagcgaaacgcgcctcgccgccgcgctgctgccagagggtttccagcaggccgatggcgttattgacgccgttcaggtaaccctcatcgccgtagttgcggatccacgaggcgtaagtattgtcagctaagtgggtcgccggatcgtgcagcaggccgaggccgatttccgcgtagccggcaacgcagggcatcagcgccgccagcagatccagggcgtcgccggagtggccaatgtccagtacgtagcgggtgtagttgacggtttccgcggcttccgtttcggcggccatcgtcgcttcatccagcccccattcccggcagtagccaacgtggagcggcagttcgtcgagaatggcgttcatcgacgcggcggcagcgcgcatttccgccagggtgcgcagcttgctgaccagcagggcgtagctgcgggcgaagtggatcagaaacagatagtcctgcgtcagatagcggcgaaaagcgggctcggggagggtaccgtcggcgagctggcgcaggaaggggtgggcgacgtagtgctgccagtcggcgccggcctgctgacgcagacgaccataaataccctgggtaaacgcgggaagaatcacaggacctcctgaaaaaagggagatccgggcgtgctgaaagaagtgtgaacaggcaatggcgcaaaactggcggaaatgccgatccgtcccttcgctggcatgacccagatcaggttcaaagggttcggcttacgccatctcagccctcacgggacacccctcggtttggcccctgttatacgacattccctttttgattacaatgctgtgaattttatgaggaaaggtgacgttgtcacgtgtgagagtcgcgagaaagggctttttgcatcgtggcagcccggcggcggctgatgccttgccgggcgcgtattatcaaaggatcagtgaaattctacccagctggcgccgctgtctgctgaacgtacgcacttctcgacccagtgcacgccgagcgccccggctctggcatccggataccagaagttttccagcaaagccgcgtcgcgacggtcggtggcatccatggcgatggcaaagcggcgatacagattcgaccaggcctcaaacagcccttcgggatggccgccgccgatccggtcgtcctgcagggccagcggatcgagataggacattccgcgttcgaggatgcgcaccggctcgccctgaatttcgtagcgcagctggttcggctgttcatcccaccactccaggctggctttctccccgacgatgcggactttctgtccgtgcattgagccgctgttgaccgccgagcaccacatcgaccctacggcgccgttgtcgtactccatcagcacatgcgcgttatcctccagcggcgcgcggcttttgacaaagctctggcgggagcacatcaggcgagtgatattgagcttcggcgccatggtctccgccaggaacagcgggtgggtggccagatcgcccagcacgtagctggggccgacaaatttcgggtccacccgccagcgggtgctggggttatcctgctctaccggctggttatggaaaccgtgggcgaactgcatattgatgatgcggatctcgcccagcagcccctgttcaatcatctgccgcgcctgcagaatcagctgatgcccggcgtagccgtaggtgacgccgatgattttgcgctgtttttcgctcagggccaccagcgcatcggcctcttcgccggtaaaacagagcggtttttcgcagaccacatgcagtccggcctccagcgccgcgcggcaaatagcgtagtgggtgttgtttggcgtggcgatggagatcgcttcaatgccgtcttcccgcgccgcctcttcgcgaaacaacgtttggtagtcggggtaacagcgcccggcctccacgcccagctgctggccaaactcgcgcccgcgctgggggtcaatatcaaaggctccggccagcagggtaaacgatccgtcacgcagcgccgcagagcggtgaatatagccaatctggctgcttccgccgccgcccaccatgccccagcgcaaggagcggccaacaggtttaataccgttaatcatgtgttttctcccgattaaaaaccaaccgagcgcaggtagcgcaggctttccgtgaccgcctgcaggctgccctcgacgttgcgcggatcgcgctcttgctcaatggtgatccagccctgatagccccgcttgtcgagaaaggcgcgcaccgccggataatcaatggcgccgctgccgagcgggcacatcaccccctccgcgcaggcggagaagaagtcgatgccgcgggaaatcacgctcctgaatacctgcgggtcgacatctttaaagtgcaggtagtcaaggcgatcaaaatggcgatccagccagctgatggggtccatgcccgaatagaagagatggccggtgtcgagacataaaccggctacgtcatgggggatttgcgccgccagcagatcgatttcatcggcaaactcaatgcagccgccggcgtgaggatggataaccgggcgaacgccgtactcctgccacgccagtcggctgatggtcacaatgtggtcgaccatccgctgccagtcggcgggtgacaggcggggagccagctcgccgcgcccggcatatttcgcccgctgcggattgccgaaatcaataatgaccagataaggcggctggaaggggttgcccggcgtcttttccgccgacggcacctgcgacaggttgcggcagaggttatgcgtcagttcgacaatattcgcgaagttctcttcgctgaccagatcgtcgaagatcgttccggcaaccagcgacagcccctgtttattcagcgctgcgctgagttcatcggcccgggtcggcagatagctccacgggcccagttcaatgcttttataaccggcggtcgccgcttcttccagtaccttggaccacggcggcagataaggatttttgggatcatcgacgccccagctgcacggcgcgttggcaatatgtatggtcatgatggcttccttttcagatgaggagaaaacatgaccagtattgaatgaaaatttcatatccaacaatgatgaaatttaaattctttgatgggattcaaggtttattttgatagcgtaaatgatagttttttatcaaatgcagcactgaagcggggcgcggcgactttacccgcgcctgcggcaatcagaggttttctttagtgaggaggtcaaacggctgcagagcgttgataaacgccgcctgcggctggctggcggcgtggacaaacgcgttgatggtggcggcggcaaattcatcaagccggtgggtaagcatgagatcgatagtgccgtcaattagcgccagctcgccgctatccaccgggccatgacaaatcagggtgacctgatgctggcgctggcgcgcgcgcagggcggcgacaatcccttccacgccgccgcagggcgcgtaaatggccttcagatcggggtactgttgcagcatctcttccgtgacctggcgcgcgacatcggcgcgttcgtggctgcgcaccggttcaagcacccgatcgcctttgccctgttcacgcaggtaggagcggaaacttatctcgcagctttcctgacaaataaaccggttatcgccgacgataatgccaatttcgccgtcgtcgtggcacagcctgtccaccgcccaaccggcggtgcggcccgctttctggttatccagcccgatatagccggtacgctgcgggatactcatatcggagagcagggtgaagacgcggacgcctttctcgatggcctgcacgaccgcatggcggataagcggattatccagcgcgacaataccgataacgtcgaccgtatcgctcagacgggcgatcgcggcggccatatcgtcgatggcgttaatatcgtaatgcagaaaagcgggggcctgcgccgggctatgccacggtaacgccgcctgctccagcgcctgcgccagctgatggtaaaacgagtgtgactgctgtagcagaatgaagcccattctgagggctaccgccggccgatccgccgccagccgatagcgggattgctccagcgcgaagcctaagcgccgcgcggattccagcactttacgttcggtgctctctttcacgggcgtgcgtttattgaggaccctgtccaccgtcgcgataccgactctggcctctttggcgatatccgccatggtgactttttttgctgacatgattctcttcctttgagggtaatgataaaaagctatcattattgtgacaggcaaacagcgaggcgggtcagacttcaggaaaatcatttcgccgcgctggcttcattgacctgatattcaactgccagggtctacactaagtgcatccccactcaggaacaggatgttatgacgtattccctctcaaaaaaattcctcgccgccacctctgcgctgctactgctctccatgagcgcggtcccggccagcgccgccgccgataatagcgacgcggtctctccgctcagcgccggaaatggcttaagcaaagcggcaaagcagtatctcctgcgctatccctcccgcagcggcgtggacggcaaaaccgcccgcgaagataccgccgcggtctttattccgtttggcgccaccccggaagggggatggccggtcgtggtctgggcccatggtaccgtgggcgtggctaatcactgcgcgccgtcgttaaacccgcgcagcgatcgcgataagcagtacctgaacacctggctgtcgctgggctacgcggtggtcgcgccggattatgccggtctgggttcgtctggcctgcaccattatcttaatgcccgcggcgaagcgtggagcgtgcttgatagcgttcgcgccgccctgaaacagttcccgctgaaaaatgaactcattctggtcggacagtcgcagggcgcgcacgccgcgttcgccagcgccggatatcaaccccactacgcgccggagctgaatgttcgcgcaacggtgctgaccggaacgccgtattttgagaagaggaccaccgcagccgacattcttccgccggcaggcggcaaagcgccgagcggcggcgacccgaaaataccctatattttctatatttacctctcggctgccgatagcaacccgcagctcaatccggctgattatttccaggataaagcgctgccgctgctgaaagaggcgagcaatttatgcattacgccgctcaatgatgaagtgatgaaggccggtctgaatgcggctaatgccctgaagccgggggtggattcgctgttaaacgccagcgtgggcgccatgctctacccgacgctgaaaatcgatcacccggtgtttatcggtattggtagcgcggatattaacgtgccgacggcaatgcaaaaacgctttgcggacgcggtgaaaagcgcgggaacccgtgcggacgtgcatatttatgaggggctggatcatagcggtacggttaacccgtctttacgcgactcggtgccgtttttgattaagacgctcaacgataagcggtagcggcgaagggatgatgagccgccctgagcaaggggcggttcagtacaggtatggcgtcgattaccagtatttggggatcagatagccatacataacgacggcgacaacaatcatcagcgtaataattgcccagtcggcttttagtgattttaccgcgttcataagttcctctttttcaatgaatcaccgggtaacgttagcgccgtcgcgcctgcatgtaggtgatagagatcacataaaaaatatttgtcatacaaataaagtgtgtcaatttttttactattctcagcaatattttgtccgctcattcgtctacctccgcacagggtaattattcaatagcgtaatgaggtaaacagacgatgagagatatcgatatgcacggtcagcaccaccatcaccgctttggccgccacagaatggcgaagccgcttcttatcggcgtggcgctaatcgccatacttgggctgctggtgatgtcgctgtggaatgcgctgctgccggccatccttggggtgaagagcattggcttctggcaggcgttaggtgtgctggcgctgtcgcggatcctgttcggcggcctcggctttcgcccgggaatgttcggcatcggtaacgcgcggcgtcggatgcatgaacgctggatgaacatgagcccggagcagcgcgatgagtttgtgcagcgctttggccaccgcgggcatcgcggccgctgcggctggcgcgaccgccgcagcgagcatgctccgcagcaggagagttcggctaaaagcgcggatcccgagtgagcacaatgaaaaacaggatcgtggcgccatcacggcttgtttccgccctcgatgcctgccggtcgcggctgaaggcttttattcgcggacggaccccgctacgcgatgaggcggacgatatcctgcaggaagtgacgtatcagctcattcgcgtcgagcagccggtggagaatatcgccgcctggttgttccgggcggcgcgtaacgagatgaccgacagggcgagaaaaaagcgcgagctgccgctggcgggcggtttcagcgacgaggaggagggcgattttcccgaggatgagctggccgaaacgctgtttggcgttgcgcaaacgccggaggatgagtatctgaaagcgctgctctgggaggaattaagtcaggcgctctcggagctgccgcccgcccagcgtgaagcctttgagaaaaccgaactgcatggctacagctaccgggagctggcagaggagtccggcgtcagcgaacaggcgctgctctcacgtaagcataaagcggtactctaccttcgtacccgcctgcgcgcgctgtacgatgaactgctggccagttaggcgttctccggctcctgctgcaggggccggagaggtgcgtttaagccgctgattgaattattgcctgtagccccaggccgtgaggaaggcgctaatcgcgcattcggcgagctgctccagcctctctggcgccaccgctttttgcgcaattaaggcccccggcagcggatagcccataatcgcaccgagaaacgccgtcgcctctagctccgggtcgctgagggtcagcagaccttcgtcttgtttctgcgccaggatatcgctcagcgcctgcaatacgcggcctgaggggcgctgttcgagcgtgacgtaaagctcgggcttttgcaccagcacctggatcagcaggcgctgaaagtgaatattctccggcgcataaaagtgctgttgcaccacttttgcaaacccgcgcagcagcgcgggaagatcctgctgacgatcctgcaaaagctggcgcaggggcggctgcatggtgtcattgagaaacgcgaacgtctccagcagcagcgcgtctttgccgccgggaaaatggctgtacagggtcgggcgcgtggtacccgcttcggcggcaatggtatccagcgacacatcaagcccgtggctgagaaacagctcacgggcggtttgtaaaatgcgtgggcgggctttcattggccgcccgcgttgatttcccatcaattgagtccttacagtttgcgccctttaaggcgcatcattccttgctgtaccagcaggaaaaagagtggaacgaagagcaaggtcagcagcgtcccggtgagcataccgccgatcaccgcggcgccaatctcacgctggctggaagcgccggcgccggtagagagtaccagagggataacgccgacaacaaatgcaagtgaggtcatcacgatggggcgcaagcgcaggcgagcgccctccagcgccgcgtcggccagcgttttaccttgctgaaaccgcgccagggcgaactcaacgatcagaatcgcgtttttggcggaaagccccatggtcgtcagcataccgacctgaaagtagatatcgttttcgtatccggcgagcaacgaagcgctcacggccccaagaatgcctaacgggacgatcagcagtacggcgacaggaatcgaccagctttcatataaggcggcgagacacaaaaacataaaggccagcgacgccaggtatacccataacgtctgcactgaggaggtctgctcctgccaggataaaccgctccattgcctttcaaacccgctcagctcgcccaccagttcggacatcgtcgccatcgccgcaccggaactgactcccggcgccgcgtttccctgaaactgcacggccgacagtccgttaaaccgctggagcatttgcggcccggtggaccagcggaatgatgagaagctgtcgaaggaggccatgttgttactgtcgccgcggacaaaccaggcggataaattatccggcgtcgaacgccaggccgcatccccctgcatatacacgcgcttgacgcgcccgcggtcgataaaatcgttgatgtacacgccgccccaagccgcagagagggtgctattgatggcggcctgatccagcccctgggcctgggctttttgtctgtcgatatccacctgcagctgcgctttctcctccaggctgttaattcgcacggcgtccagcgtcggcgtttgcctggcggcagtgaggagggtggtttgcgcctcgatgagcgcctggcggccgttttccgcgctgtcctgcagccagagttcaaagccgctcgactgcccgagtccgcgtacggtaggcggcgacatgacgctgatggtggccagccgggcgttttttaaaaagtaccggttcgcccgcgcgataatcgcctgcgcgctgttctgttccccggggcgcgcgtcccagtgctttagttcggcgaaggccatcccgacgttctgcccgctgccggcgttgtttctgccggtgaccataaagatgacgttgaggttatcctcctcctcggccatgaaatagcgggtaatgtccgcgccgaccgcctcggtcatcgccatcggcgaaccggatgggagcgtaaactgaaccatcaccgcgccctgatcctcttcgggcagaaagccgctggccagcttctgatactgccagagcatcaaaagcgtcagcgtcagggccagcagcacaaagcggagcgggcgaacgattatccgccggagtatggcgaggtaacggttctggctggcggcgacgccgcggttgaaacaggtgaagaatcgcccttttttaaggtgcccgggtttaagcagatgggcgcacagcgtcggcgtcagggttaacgccaccagcgcagagagcgccattgccgagacgatggtgacgctgaactggcggtagataatccccaccgagccgccgaaaaacgccatcgggataaataccgcagagagaaccagcgcgatgccaatcagcgcgccggtgatctcattcatcgagcgcagggtggcttcaggcggggtaagatcctcctccgccatcaggcgttcaacgttctccaccaccacaatggcgtcatcaaccagcaaaccgattgccagaaccatcgcaaacagggtgagggtattaatgctgtagcccagcaggctgaggatgccgaaggtgccgagcagaaccaccggcaccgtgagcgtcgggatcagcgtagcccgccagctctgaagaaagaggtacatgacggccaccacaaaaagaatcgcctcaatcagcgtacgcaccacgctttcaatagagaccgtcacgaacggcgtgctgtcgcgcgggtaagcggcgacaacgccttgcggaaagcgcggcgtcaggcgttcgacctccgcccggatcttctccgccgtcgccagcgcgttagcccccgaggccagctgaattgagatcccggcggaggggaaaccgttgagcgtggtttggttttgatagttttccgcgccgatctccacccgggcgacatcgcgcagatagaccaccgagccgtcgctgtgggtacgcaggataatattttcgaactgttccggacgctcaaggcgggactgggtggtgaccgttgcgttcagatactgcccctccagcgtgggcagcgaaccgatttcaccgctggtgacctgcgaattctgcgcctcgatggcggcctgcacgtcggagggcatcagaccgtagctggtcagctgcagcggattgagccagatgcgcattgcatactgggcgccgaaaacggtggtttctcctacgccttcaacccggctcagcggctcctgcagggaactgacgagaaagtcgctaatatcgaggctggttaacgacctgctttggtcatacagggccaccaccatcaggctgtctccctgtgatttggtcaccgcgatcccttgctgctgcacctcctgcggtaagcgcgtgatagcctgattgacggcgttttgcacctgtacctgcgccatgtcagggttaatgcgctgatcaaaactgaggctaatgcgcgcctggcccgctgaactgctgctggaggaaaaataaagcaggccgtcgatgcctttaatctgctgctccagcacctgcgtcacgctgtcttccacggtttcagccgaggcgccggggtagtttgccgtgacgttgacgccgggcggggcgatatccggatactgttcaaccggcagggtcagcagggcaagggcgccggccgccataatacagatggcgatgacggcggcgaaaactgggcgaaacacaaaaaagcgagccagcatcgtggtgcaccttcggtcagttaagggatgcttgcagagcaaacacggcggatggcgcgtttatcgcatcgtcggacggaatcggggtaaagggcagcccatggaatgcctcatcgtggactttgctcatcaagaagtcgccgatctcagaacatgacgtcgtacgctggtactcactccacagatagtcgtaggtttgaatgctgaaaatattctgctgcagtaaaaagtgcagatagcgttgccgctgttccacgcgctggctaatgagcagggcgcgacagcgccaggcctcggacggttcttgtaggtgcgagcaggcgtcatagagcggggcgccctgcgcgggcaggctgggtaaagcggcgttcatcgcgcaggggaaaatggctaatgcaatgaaataaaaaagctttccccatttttctttgttaatcatcagattcactccgccagtttatttactttacagtaaagtaaataaactgtttaaacaagcgttcatctgtacgaagagtaaacggggaaagcgaggggggatgagcaggaaacgcctgctcaggatttaaaacatgccgttgccgctggcggttttttgcggaacgttctgggtcacgtcccagtgttcaacgattttatgctgctcgtcgacgcggaagatatcgataatcgcccgcgtcacgcccggctcgcgaccggtgacctcaacgtgcaggatcacatgatcgccgtcgacaaacgcctgcttaatttcgctgtgcgagtcgggatatttgttcttcaggaaggcgataaattgctcaaagcctgcaacgccgtctttcgccatcgggttatgctgtacgtagtggtctcccagatagggtctggcggcggcaaagtctttgtcatttaacgctttattataaaaatcaataacattctttttattcagctgttcattttcactgttgcccgcaaaaacggcgggcgtcagagcgcagaacaaggaaaaggcgacgatcgattttttcaacatacatcctccggtggggttgataccaggttcctggcctgtcaggtgagtgcatcagcttccccagcggcttttcaggtagttaacggcctgctgggtttgcggctgattgaggtaattctctctgaataaaatcgtgccctgaatttgcggcatggattcattcagatcaagctgctttttcagctccggcacgccgccgctaatcatccagtcaggttcgttcttcgatggctcgccaactttgtacagcgccacgccgatatagaggcgggtatgggtgggtttcaccacgtcagcccaccactttgccagcacatcgtagcgggccgcttcgcgggcgaaaggccagtaaatctgcggcgcgatgtagtccagccatccctgctggacccagaggcgggtatccgcatacgactcatcgtaggccgctgcgccgcgggtatccgaacccgccggatcgtgggagcggttgcgccagacgcctgccggactgacgccaaattcaacatcgggattcagctgcttgatggtgcgggaaacctgctcaatcagcagctgcgtgttgtgccgccgccagtccgctttcgcggcaaagccctggccgtactgctggaacgtccggttgtcgttaagggccgatcccggtgattcggtgtagaagtaatcgtcgaactggacgccgtcaaccgggtaatgctccacaacctcggccacgatgctggtgatccagtcgcggacttccggaatgcccggatcgagcacgaagcgatcgccggaggtgcgaatccactcagggtgcaggacgtatacgctggcgggaacctgcgacagcgtgctgttcagttcggtgacggttttcggccgcgtattgaccgagacgcgataggggttaaaccaggcatgaacgcgcatgccgcgcttgtgagcttcatccagcataaacttgagcggatcgtagcccggatcctcaccgattttgccggtcagcatatcggaccacggcagaatcttcgatggccagagcgcggtgccatccggtttcacctggaagaagacggtgttaatgccgaggctttttaaattatccagcttggcaaccagcgcctgctgctgcagggcgatgcggcgttcggcgctaatgccgccattgacggattccagcggcggccagtcgaggcgcgacacggtcgtcagccagacgccgcgcaccggctcctggcttttgggcaacgtcggctggcgggtcgcgggcggcatgggcgtgacaagagaaacgggcggtttgctaccgcagtgggctaacagcagcgcggcagctatagctaccgcggatattttcaccttgttcagaataaacttacgagagcggatcgtcatcatatttgccagcttttctggtcatcgcacaaaagagtcattttcgtattattcggctttaagtcaatcatttagctacagatgcggcggcataagcacgcaaacctcagacgcagaaaacgcctcctgcgccgcgcaatggtttgccatgatatatcattgatatgcattaaaacttgatcggttcagggcgagtataaacaggacttattaaaatttggccaaacaattgacctttggccttttccggcgagtcaaactggattagcacaatgaactactcatcatcacgccatcgtctgtggatactcctgtttctgattgcgctactgagcctgggcaccgggctttgctactggcaaatgcaaaaaaaggtggatcaagatatccattcgcgcctgcagcaggcgatagccagccttgatgtgaccgtctcccatgcggagcaggcagccgatcgggctgagcctttttatggtaaaagctgtagcgagaatgtcctgacggagctgcgtacgctggtggccaccattcccgatgtgcgcacggtgaatttaggtaaggataacgaaatatactgcacctcggtttttggcgggcgtaaatttcagttcgatcgtcgccagtatacgcatggcgctctgcgcctgctgagcggcagcgaaatcacgccgtttcatcccttgatggtttacagcgaacaggatgagcggggaaatacgattctggttggcgttgacggctattatttatacaacattttgaccgttcttgatggcgatgcgcatctctatcttcaggttggcgatcggataatgacccgcaaaggggaagtgacggcgacgccggatatcaaggttcccgtgcgcctggcctctgagctgtttacctattcggttattgccgaccgcggctacgcctctggcgtcggggcgtttatccgctatgagcaacacacgcttatcgccattattctggcctccttgctgctcacctttttattcagaaactacctccgctaccggaatacgattgagtatcagctcagaaaggctatcgaactgaagcagctcaagccctatattcagccgattatcaacaatgacagcggagcggttatcggcggtgaggtgctggtgcgctgggaacatccgaagcagggatttattgcgccggataaatttatttccgtggcagagcagaccggcttgattaaagacgtgacggcgatttgctttgccgaggtgatccgtcagcttcggcgccatcaatccgttatccctggagggttgtttatttgctttaacaccagttcggtaaactttcaggacgacgaaatagtgaccctgtgccagacgtttatccagcagatgaaagaggcgcaagtccgccttgttctggagataaccgagcgcgagtcgatcgagaatacccggcaaacatcagcggtgacggacaaactcaggcgtatcggcgtccagttttcgctggatgattttggtaccggctacgcgaactacagctacatccagcaatttaatcctgagattatcaaaatcgataaggtctttaccctcaacattgtgaccaacacggcttccgcgctggtggtgaagaatatggttaatctggccaggaagtttcattgccagattattgctgagggcatcgaggataaggagcagctcacgatgctcaaaaatatggggattaccctctatcagggctattacttttctaaaccggtgccggtcgatgcgtttattcagatgcttcctcgctcgtttagcgagtcaggaaggccctaaaggcgacgctcttgcctacgcaaaacacaggaaattaaaaggtgatcgactcggcaaaaccgagtaataatgacccgttcaagctgaaaatttgacattattgagaaacaactcaacaacatggaggttgtcttgtttgaatctcatctcaatatttttatccgcgcggttttcgttgaaaatatggcgctcaattttttcctcgggatgtgtacttttctcgctatctccaaaaaaatcgatgtcgcatttcgcctcggggtaaccgtgacggcgctgctggccattgcgacgccgattaacaacctgatttaccattatctgctgaaagagaacgccctgatcgaaggggttgacctgagcttcctcgatttcatcacgtttatcggcgttcttgcggcgctggtgcagatcctcgaaatggtgatcgacaaatatttccacgcgttaaaccatgctctggggccgttcctgccgctgttaactatccactgcgccattttcggcgcgacgatttttatggtgcagcgtgaatacagcttccttgaatcactgacttatggcaccgggtgcggtattggctgggcgctggcgattgtggcgctggccggcattcgtgaaaagctgaaatatgccaatatgccgaaaggcttacgcggtttaggcagcgtatttattaccgccggcttaatgtcgctggggtttatgtcgttcgccggcatctcgctgtaggctgcgctgaacgtcgggggagagattctgccgtccagaccctggggttgtacggcagaaggcgcgaaattattgcctcagcgttttactacgggtagttaaacgcatccggatggttctccaggctgccgctcagggcggcaaagagcaccgtcttgccatcgatagagcgttcatctccaacattcagccaagtcagtgtctcctgggcggttttttcgtcaacggcggaataaagcccggacatctctccggatttttccgaccacagcacggcgaagcgctccgctgcgcagtcgtggggcttgcagacgctgaatacctgatagacctcggcgccaagcttcaccgtccgggcaggcgagcccgtgccgccggactttatccaggcgggcagggtatgccctttaaccatctggctaaaggctgccggttcctttttggccagaccgtccagcgtcatatcggtttgcgccatggcgtgggtggatgcagccagaaaagcgatagcggttaagtgtttaagcataaaattgctcctgcgaactctctgattccgtttgatggccggtgataatggctctgattagctgtttttggtctgaacccaaaaagcgtggataaggcctggaatatagccgaggatcgttaaaataatattgaggataaacgcccaaccaaagcctttacccagcagtacgccaagcgggggtagaataatcgtcaacacaattcgccaaaaacccataatatctccctgttaagtgagttagctcataattattttagcggttgcgcctgtttttgcaaattttaactttttgaataataagactgctaatattacccgcgcctcgttactacatatttaataaatagaaaagccccaattcacctttctgacatatataagattattccagggtgaggcttgcgtcagcaacgctgacaaagcaagagtgttccatcgtaaacgcatttaaacgtaaataaggaatgcaggtaacgaggcgggaagtgcgctacactggcggggagatttatcccatcatgaaatggcggcggcatggacaacattatcctttataaagttatcgtcatcctgaccattgtcgggtggggctggagcatggttagaaggaagcagaaaaagcaggtcctggaacccactattgcgcaggcgaatgccagggagcgttatcagtggcgttatttcaggtggggctggagagttttgcaaatcgtctgcggtttttatttgctgattactctcatccagtttcttctctgcggctagcgttcgccgctgcggcgagctggaacagcgcgcgacagcggcgaacgcttcttttatgcgacgccggtaccgccgtctgagcaccagacctgaccggaagcgtacgagcaggcatctgaggcgaggagaacgtaaaggggcgcaatctcgaccggctgtcccggcctgccgagcggcgtatcctcaccaaactgctgaactttctcttgcggctggccgccgcttgactgcagcggagtccagtacgggccgggcgccacggcgttaacgcggataccgcgcggaccaagctgcttagccagcgatttggtaaacgccacgttgcaggctttggtctgggcataatccagcaggatctcactgggtttaaacgcctgcacggaagaggtgttaatgatcgccgccccctgagagagatgacgaagcgcggctttggttatccagaagggcgcataaacgttggttttaaacgtggcgtcaaacgcggcggtcgttaacgcctcaatggattcacaatactgctgcctgccggcgttgttgaccagaatatccagcccgcccagctcagcgaccgctttttcaaccagggtatcgcaaaatgactcaatccgaatatcgccgggaatggcgacggcttttcttccctcggcctggatcagcgcgataacggcagccgcgtcggactcctcctccggcaggtagccgatagcgacatccgcgccttcccgcgcgtaggcaatcgcgacagcccgaccaattcccgaatcaccgccggtaatcagcgcttttttccccgccagctttccggaaccggtatagctggtctctccgtgatcgggaaggggcttcatttcggatgccagccccgggggctgctgcggctgctcgacaaacggcggaagtggatagtgtagcgttgggttatttcctgttgtcataccggcctccttaataaatgaaatttaagattagtcaatgactgcgttggggcgataaaaaaagcgcaaaccaggaataattaacatcgtaaaaccaggaattatttacctggcttttaagtcaacatgtaataccagaacaacgcaatttcatctttttccggtaacgcgctgtagagataacgatcgtatccgcccagggtaaagccataatttcgatagaaaaggcaggcgggaacgttgacgttctgggtttccagctttaatcccgccgcgctcatgctccgagcccatatatgggctgccgccatgagcttgttggccgcgcccgttctgcgctgtgagcgctcgatggcgatataatccaccgaaataaatttgttccagatcaaggaagcggtgataaatccggccacttgccccgcgtcggtttccgcgattaaaaatatagcatccggattaacgcagtggttttccagcgtctggatatccagttcataggttttattataagtgctgggaagtgtttcaattttcagatcattattgacaaaggggccggtggcaatctggctgacggtgaaggaaaaatcacaatattccagacgagccaggtcggaatttaatcctttacgaatctgcatagcattccttgttttttaagcgatttattaatcatagacaacgcctttaaaaatatcagcctcgccagcaacagcgcacgcgtttaaacctggtctaatcttatattcatgccgcattttccacaggtcatttgaggatatttaatggaatccagagtatttaaaaaacattggggggcggagttcattgccgcgtacacagtccgctttcgcgtctgggccgaaggtcaaaaaacgatgacgctgagcctgacggggcgggatattccgatggacgccgcgggagagggctggttccagattgacgtccccggcgtaaagcatggtgatgaatatatgctccgtttagccgacggcacgcgcattccggacccggcgtcgcgcgcgcaacgcgatgatgttaacggcccttcggtggtcatcgaccccaggcgttttcagccggttaacgctggctggaaagggcgtccgtgggaagaaaccgtgatatatgaacttcatccgggcacctttacgccggatggcacctttctggccgccatcgaaaagctgccttatctggcggagctggggatcacccagatagaggtcatgcccgtagcccagtttggcggttcccgcggctggggttacgacggcgtattactctatgcgccgcacgcagcgtatggcgcaccggaggattttcacgcctttattgatgccgcccacgggttagggctatcggtggttctcgatatcgtactgaaccattttggcccggaaggcaactatctctctctgctgttgccgggcttttttcatcaggaccggatgaccccgtggggtaacgctatcgcctatgaaaccgaggccgtgcggcagtatattaccgaggcgccgctgttctggctgaccgaataccagctcgatgggctgcgctttgatgctatcgatcagattgaagatcgctccgccaggcacgtactgatagaaatagccgaaaatatccgcgccgcgattcccgaccgccatatccacctcaccaccgaagacagccggaacgtgattttcctccatccgcgcgatgagaacggacagacgccgctctttaccgccgagtggaacgatgactttcataacgccgcccacgttttcgcgaccggcgaaacgcacgcctattatcaggattttgcgcatcagccggcaaagaatgtcgcaagggcgctggccgaagggtttgtctaccagggtgagctttctgcgcaaaccggaaagccacgcggcgtggcctgcgccgctcagccgccgcagttttttgtcgactttattcagaatcacgatcagaccgggaaccgtgcgcagggggagaggctgatttcccttgccggcgccgggaaaacgcgcgttctgctcgccgcattgcttctgtcgccccacattcctttgctgtttatgggcgaagagtttgcggagacgaacccctttctgttctttaccgattttcatggcgacctcgcgaaggcggtgcgggaagggcgggctaaagagtttgccgggcacgcgggacacgatgcaccagtccctgacccgaacgatccccggacctttatccgttctaagctcgactggcagaaggcggcaagcgaggaggggaaagcctggctgcgcttcacgcgccaccttatccagctgcgccatcgctatattgtcccgctgctcgcggcgggaggggccgcggagggcatgatcctgcacgcggcggcgcaggcgctggcggtgagctggcaattctccggcggcacgctctccgtggcgctgaatatcggcgaggagcgggccgcgatgccggaaataccgggcgaggtcatttttagctggccggagcggcaggaggcgttatcgccaaacagtattgttgtccgttttgcacatggagaagcctcatcatgatcccttccgcaacctatcgtattcagttccgtaacggcatgaccttcgatcgcgcggcggcgctggcgccgtatctcaaagacctgggaatcagccatctttacgcttcgccgatttttacggcaaccagcgggtcaacccatggctatgatattaccgatcctaacgagatcgacccagccatcgggggccgcgaagggtttgaccggatggtcaaggcgctgcgaaacgcgcaaattggcctgattctggatattgttcccaaccatatggcgacctcgctggagaatcgctggtggcgggacgtcatcgagcagggcaaaaacagcgcctgggcccattatttcgatattgactggacgcgtcccgttacgctgccgtttctgggggatacctttgaggcagagctggagagcggggcgctcgcgctaaaacgcgatccggaaaccgggaagccggcgttcgtctactatgaccaggcctggcccctgaatcctcaaaccctgtcgacaggtgagcaactactaacatctccggatcgcgacgccattctggcgctgcacgaggcgcaaagctggcggctgatgtcctggcgggaagcgcccaggcagctctcctggcggcgcttttttgaaattaccggcctgattggcgtcagggttgaagacccggcggtgtttgacgacacccaccggcttatccttgaactggtgcattctggcatcgtcgatggtctgcgcattgaccatatcgatggccttgccgacccgctggggtatttgcagcgcctgcgccaggcagccgggccagagtgctacattacggtggaaaaaatcctcgccaaaggcgagcagctgcccgccgactggcccgtctccggcaccacaggatatgagtttatcgcttcgctggcggaagtgctggtggatgacaataacctcgatcagctgcagcaggttcatgacgaagcgctcggcggagcgatagatcgccacaccgcgctgcgcgaggcgaaaggactgatggtggatcgcaattttgagggtgaatttaccaccttattgcggctggccaccgagctggcggagcgtaatagcatggcggttgagagcgacgcgctgcgccatgccttgcgtgaactgctgctggccttcccggtctatcgtacctacggtaccgccgaagggctgaccgcaggcgatattacgctgttaaaccgggtggttgaccaggtgaacgccagggaagacaaacccgatgccagggcgcttgaggtcattatcgccatcctgaccggcaatctgcacgaaagtagcctcgacaccgcgtcactcttcagaacccgctttcagcagctgacggggccgttgatggctaaatcggtcgaggatacgctgttctttcgccataacctcgacctggcattgaacgaagtcggggccgatcctactcctcgcgcattttctctctctcgttttcaccaggagatgcgcattcgtcttgcccgccagcccgacgcgctgctgggaacatcgacgcacgatactaaacgcggggaagatgcgcgcgcccggctttacaccctgacggaagcaccgcagctgtgggcggaaaaccttgcgcgctggcgtcagatgaatcaaacccaggtgcgttttttgaacgacggtacggcgccgaacgcggcggatacgtggatgatctatcaggcgctcgccggcgtgtggcctgcaacgctgctgcccgacgataccgcagggctgaaagcactcgagacgcgttttcttgcttttatggaaaaagcgctgcgcgaggccaagcaaagaaccgactggatcgacagcaatgagagctatgaaagcgttgtgctgaactatgcgcaacagctgttcgctgcggataattcgctctttctcaacgattttcacaccgccctgcagccttttatccgtgccggcctggtgaacagcctcagccagacggtcatcaaactgaccgcgcccggcgtaccggatatttatcaggggagcgaggcgctgaacttcagcctcgtcgatccggataaccgacgtgaacctgacttcgccgtcctggcgcataacctcgatagcgaaggtcctgagttgtttaatagcgaaaacgcatggcgagacggacagctgaagcagtacgtcaccgcgtcgtttctcaggttaaggcagcggcatttcgcgctcttccattatggtgactgggtaccattaaaggtcaccggtgacagggaagagaatcttatcgcctacgcgcgcatcaacgacgaggaggcccttatcgtggtggttcctcgcctggcctttgacgtcgcggcgcacgggttggctgattccccggccaggctgtggggcaacactgcggtagccatacccgaagatctggcaggacgacattatcgcgatgcgttaaccggcgaaaaccgtcttgtcgaagaggcgctcgatctggcgtcagcaacggggtggttagtaacgcttattagtgaaaagaaaagtagagaggaatagtgtcaatgaaagaaacgtttgcaatagagcccggggacggccagcagctgggggctaattttgacggaaagggcgtgaacttcgcgctgttttcagcgcacgctgagcgggttgagctgtgcttattcgatccttgcggaaaaacggaaatagcccggcttgaactacctgaatatacacacgaaatctggcacggctacgtacccggtctgcagcccggagccttatacggttatcgggtttatgggccgtacgatccggagaacggccatcgctttaatccacataaattgcttatcgatccctacgcgcgggagctggaaggcgatattgaatggaacgatgcgcatttcggctacgagatgggccatgaggagaaagatctgagctttgatacccgcgatagcgcgccttttacgccaaaatgcaaggttgtcgacccggatgccttcgactggcagggggaaaatcgccccgacgtcccctggccgcatgcggttatctacgaaacgcatgtgaagggttttacccagcgcaatccggcgcttcccccggagctgcgcggcacatttgaggggcttgggcatcaggcttccgtcgattatatcaagagcctgggcatcacttccgttgagctgcttcccgtacactggtttccggacgatcagcatctgctcgacagagggctaaaaaacttctggggttacaatacgctgggcttcttcgctcccgcgtcccgttactacggacccacgggtatcgcgggcttccgcgacatggtgcgcgcatttcatgatgccggtatcgaagtgatccttgacgtggtttacaaccacaccgcggaaggcaatgagctgggaccgacgctctcatttaaaggcatcgataatttttcctactaccggacgatgccggatcagcatcgctattacataaatgataccgggacggggaacacggtgaatacctcgcatccccgggtgctgcagatggtcatggattcgctacgttactgggctcaagccatgcacgtcgacggctttcgttttgatctggggaccattctcggacgcgaacccgagggcttcgatccgcgaggcgggttcttcgatgcggtaacccaggatccggttttatcgaagcttaaactgattggtgagccatgggatatcggtcccgggggttatcaggtcggcggttttccgcctggctggggcgagtggaacgataaatatcgtgatacggtgcgggaatactggaagggggataatgtttccaatgactttgccgcccgtttactgggctccggcgatctgtacgatttacgcggccgtcgtccgtggtccagcgtcaattttattaccgcccatgacggctttacgttgaacgatctggtttcgtataacgagaagcataatgaagccaacggtgaggacaataacgacgggcataatgacaaccgctcctgcaattatggcgaagaaggcccgacggaaaaccaggatatcgtcgccgtccgcgaacgccagaagcggaatttcctgaccacgttattattctcccacggtacgccgatgctgctggccggcgatgagtttggccgttctcagcagggcaataataacggctactgccaggacagcgagatttcatgggttaactgggaagcacagtccgagcaggaccatgcgttgcgccatttcacccagcgtctgatagcgctgcgtgcggagcaaccgcttttacgccgcgaaagctggcgtgacgggctcgagatacgctggtttaacgccggcggcggtctgcagcaatctgaacaatgggatgaaggttcgacgttaggtctcgccatcagccgacccgaccttgaacaggaggagggcatctggcatgacgtgctgatgctgttcaatccctttgagggcgatgttccgttccagatcccgcagtttggcgaaggcggctgggttcttgagctgtcgaccgctgaagaaaaaacggacggcgtcatcattaccgagacaattgattttgttctggccgggcgcagcattgcccttttcagacggccttaaagcctcagacaaacccggcgctgaatgccgggtttatattgtcattattgatgcagcggctgaccactggcggcaaggatggattcatgcatggcttcagaaagcgttggatgagcaaagatcatcgataagagactctcatctgtggcctccagatgatgcgcgataccaaaaccctggatctgttcagtgacctgctcaccaaccatatgcgcgcccagcagttcgccggtttcggcgtcgaaaacagtctttacaaaaccctccgtctccccgctggccagcgccttaccattcccctgatatgcgaacttaccgatcttgattggccgtcccgtctcgcgagccttcgcctctgtcaagcccaggctggcaatctgtggccgggcataggtacaaccgggcacatagtcgcggttaagagggcgtacgccttcgacgccggccagcgtctcgacgcagatcgcgccttcgtggctggctttgtgcgccagacacggcgggccggccacatcgccgatagcatagagcccaaatacgttggttcggcaagctgcatccgtcttgataaacccgcggtccaactcgactcccagcgcttccagccccaggccttccacattaggctgtacgcccgctgccaacagcacacgttcgacttccagggtctgttcggcgccggtggttttcagggtgcagcgcacgcccgtatcggtgcgctgtacctgcgtcagcagcgtttggcaatggacgtgtataccgcgtcgttcgaacgatttacgcacggtagcggagacttcggcgtcttcaacgggcagaatctgcgcggcttgttcgaccagcgtcactttgctgccaagatcgttataaaggctggcgaactcgactccgatggcccctgatccgatgattaatagagactccggtaagcgctcaggctgcagggcctcaaaataggtccagattcgctcaccatctggctctactcctggcaacgctcgcggccgggcaccagtcgcaaggatcacatgacccgcgcgatagtctcgctcttctcctcggggatcggcgaccgtgacttgccccttaccacgcagccgggcggtgccggtaatgaccgtaacgccatttttcttcagcaggtactcgacacctccggtcagctgttgcgacacggcgcggctaaactgcaccagtttctgcacatcgaaactcacctctctgagactaaaacccagccgatcggcatgcgcaatactgtgcgccacctctgcaccatgcagcagcgccttggttggaatgcatccccagttcaggcagatcccccctaaatgctgcttttccaccaatgctgtacgaagccctagctggccggcacgaatggcggcgacataccccccaggcccgccacctattatcagtacatcatatttgtcgtgcatagctcgtctcctcgataaacaacagcgtcggtgtttcaaccagccgcttgagcgcctggagaaaagccgcgcctgacgccccatcgatgacccggtgatcgcaggacagcgatacggtcagttgatggcggacgacgatctgtccgtcgcgaactaccgctcggggctcgcctgcgccaatcgcaaggatcgcgccctggggtgggtttatgatggcgtcaaactgccgtactccgagcatgcccaggtttgacacgctaaaggtgccgccctggaattcttcgggcttgagcatgcccgcccgggctttggttatcagagaatgaatttcgtttgatatgtcgcttatcgacctgctgttggccgaacgtacgataggggtaattaacccgtctggcagcgcaacggccacggaaatgtcggcatcggcaaaacggcggatgctctgggtagcctcatcaaactgtatgttgacgtccggcacggctatcagcgccatggcgcaggccttaaccagcatatcgttaaccgaaatcttgacgccgggtacttcgctgttgatttccttacgcaatgctaagagtcgctccagatcgagatcgacggtcaaacggaaatgaggtgcatgttgcttggacatttgcaaacggccagcgatcgctcgccgcatgctggacatcggcaacgtctcaaaggctgtcgctgacgtggcttgtggagccccggcctggggtagcccatcaagcagcaaagcggccgccagcacatcatcacggctcacccgtccgagtgaaccgcttttgcggcagtcgtgcaggttgatccccagtttgttggccagacggcgcgccaacggggttgccgatacctggctatcatcggtatgcgatcgcggcgctttgccggaacgaacgggcggcggcggagaggcgatacggccgcctgcggcaacgatcgcgctctccaggtctgcgacagagatacgctcgccgcgcccgctaccctggacctttttcaagtcaacgcccaaccgcgcagactgacgtaacgcatggggagtggcattcacctgagtcggatccgttatgccttgcaggctggtgggtacctcggtctgcccaatggatgccgcaggcttattggcgggggccggtacaacggagggcgcgacggccgctacagcaggctcggtagtctgcgtgacaggcgctgctggctgcaccgcggccaggctggcggcaaaggcatccagttcagcatcgcttaccgaagagtcagctaccagcgccaaaacagcgccgaccgggagggtatctcccacccgggcgattatccgccgtagcgtaccggcgaagggggcctccagaacattgacgattttgctggtctcaatttcacagatttcctgccctttggcgaagcggtcaccctcctggatggcccaccgcgcgagcacgccttcctccattgaaaggccccacttcggcatttcaagtgtcctgatatcgctcatagcttaatcctccagcacttgacggacggcagcttcgatacgttcaacgccagggatccagagtttttcgagagcaggggagaacggtaccggggtgtgtggtggtgtcaccagaacaacaggcgctttgaggaaatggaatgcctgggaagcaatcagcgctgcgacatcatgagcaaagccaaaacgcgcggctgactcgtcgacaatgaccacgcggccggtagaagccactgattccagaataccttcttcgtccagaggcgagattgtacgtggatcgaccacctccaccgagatcccctccctggccagtttgtcggcgacctggtttgctttatgtaccattgcagacaacgcgatgatggtgacatcctcaccttcacgggtatagttggcgacgcccagggggagggtataaatctcgtccggtacctcgcccttgaggtcatagagcattttatgctcgcagaacaccaccggatcgtcgtcgcgaatcgactggatcagcagccctttgacatcataaggcgtcgatggcacgaccaccttgagccccggtgtggtagcaaaaatattatagggtgactgcgaatgctgggctgctgcagaaaaaccagcaccgatcatgccccgcatcaccagcggcgccttggccttgccgccaaacatatagcgaaactttgccgcctggttgtacagcgcatcatggctaacaccgaaaaaatccataaacatcagctccgccaccggccgcagacccgttgcagcggcgccggcagccatgccgacgatcgccgactccgtaatgggggtgtcgatcacccggtcggagccgaactgcgtccacagccctttagtgactccgagcacgcctccaaaggcctctatccttgcttcttcgggcgcatttccgccgtgaccgccgcgcaagtcttcaccaatcagaacgacgcgttcgtcgtgctccatttcctgggccagggcttccttgaccgcttctcgataggtttttataggcattgttatcaccctcagtatgagacgtaaacgtctgtaagcaggtcttccggagccggataggcagcggcgcgcgctttgaatacagcatcatcgacaagtgcttcaaccgccgcgtcgatcgccgccagttcctcaagggagatgtgttgtttgaccctggtggtgaaaatcttcagcggatcatgttgttcacgcagacgttgaacttcgccctcagcgcggtaaagcgccggatcgccctcaaagtgaccgtgccagcggaaagctttggcctcaatcacgcttgggcctccaccttctcgggcgcgcttgacggcctctgaggtggcatcgtaaacggcaaagaaatctgtgccatcaaccgtcactgccggtaaaccgaagccggcggcgcgcccggcgatatcacgaccaccgacggcgtaatcatggccagttccttcgccataaccgttgttctcgaaaataaagatggcagggagttgcagcaccactgccatgttgatggcttcaaataccaggccctgattagaaccgccgtcaccggtaaaagagaccccaacgttaccggtcttgagggttttggccgtcagagcagcgccgatggctaacggaggggcgccacccacgatagcgttcgcacccagcatacctttcgacagatcggcaatatgcatagagcctcccttgccccggcataatccgctgtccttaccgaatatttcagccatcatgccgtgaatatcgcagcctttggcaatacagtggccatgcccacggtgcgtggacccaatgaaatcagcgttagtgagattttcgcagacccccaccgcaatggcttcctcaccggtataaaggtgaatgaagcccggaatatcaccgctggtgttttcctgatgcaaacgctcctcaaacgtccggatttcgcgcatcttacggtaagcctggagtaaagcctgtttgttaagcatcacttaattctcctcagtaaaggtcgtcaggcgggggtttgacaggctggaagccccttaaccacgccgatgcaatgaatctacgagtgcgacgaggaggtgcgaagccaccttcatgggggggtaggagggggttttcatgcttgaggtcaaactttataaattttatgtatctatcgagaggggtggctccatgccatcccgggctctggcgtacaattgataaaaaaataatacgagtagataactacggatgaagccatcggatttgaaaagtcgccaggcaacttcactggtctccgggccattgcggctgacgagagatttgccgctaatcctgaccaaattcgttccaccacgctcttcgatacggctgctacagcgctcacggcttctgctcctcctcgatcgcatgcagcgacgccgtctgggcgtcgtttgcgcgggtgctggatttggcaaaaccacgctgttggcgcagtggtatcagcaaatgattgcccagggtgaacgcgttgcctggcttagcctcgatgaggatgatgatggcgtatggcagttcattccttatctgctgcaagcattgcggccgctctatggcgattgggacgccgacttttggcgcaacatagaagaacagacgccctccagttctcaacagctgctggccgggttgattaaccaactacattactgtccgcacgacctgtatctgatcgttgatgacttccatatgatcaatgatgctggtgtatatgaagccctgggatatttgctcaagcatgctcctgccgccttgcacctgatcattggcagccgtttccaccccagtctctctctgagcctgcttcaggcacaggaccagctggtggaaatctacgatcgagacctgcaatttacgctcgaagaaaccagacactatttcagccagacgattgacataccactcagtaatcagcatgtacagcggctactttccgcgacagaggggtggatcgccggcatgaaaatcgcttcgttatccccagaattgctcaatgatccagaacatctgctgcgcaatattcgtggtggaacccgcgctatcgcccgttatctgaaagaggtggtacttgacccattgccacaggaagtttttgattttctggtcaaaacatcgtttcttaatcgtttaaatgccgggttatgtaatggagttacagagcgtgatgatagtgaagcgatactggcatggattgagcggcacaatctttttttgtcagccctggacgaacaaggctgctggtttcgctaccatcctcttttgcaggaaaccctgcgaacaatattgcagcagaacaacgatatcaacctcaagcacttacatgaattagccagtcattggttcgttgagcagagattgtggtccgaggcggtacgccacgcactggcagcgggcaagccgatccataatcctgggcaggatggcgcgggcgcgcagtcgctggcggaagaaggggatatagataccctggtttcctggatgcatcacttacctgcgagtactgacccttcgcgcattgacctgcaaatcaatctggcctgggcgctggcgcactattttcgcttcgatgaatcgaggcagttacttgataatcttgaccaaatggtcgttaatcattgtgatgatataacccccaacgcctggctcaaattacgtgtcgtgcgcgcaatttgcgaagcttttgccgagaaaatcccggaaagccttgcgattgttgagccgttgctggctaaagtgccctgcggagacacctgggtcgacggtctcatatgcaatattctgagctactgccacgtggttaaccagcgctatagcgacgctcttgaggttcaacggcatatgccttgcccggaaagtccactagacaatctatttgtctcggtttatcgcgcttttatcatcactcagtgccatcttggtcagggtgacctggagaacgcctgggggcatgcagagaatgcattgcgccaggctgagcgttataccggccctcagtcgaccagcggcgcgacgcttgcgccgctgctggcggaaatggcttacgaacgtatgaatctggactcattaaatacgctgttagcagatagactcgaattcatcgatcggtttggtccacccgacgccctgagtcgctgctatacctatcttgcgcgtcaggctttgaatgatgatatgccccatgaggcagaacggctgctggaacacgcgcagcgactagcggtatctcgcggatggcaacggccgcaggctttattgttagcagagcaggcgagagtgcgcctgcagcgcgcgaattatccaggcgcggagcagctgcatcggcaactcgaacaactggcggcccgtgccacaattgatgccgaaaacccctgtcaacgcgcaatagctcagcatgccaatgtcagccgcagtcgcctgcttctggcgtcaggccaggcgccacaagccagccttttgctgggcgaactcgtgactgagcaggagcgtcggggcgaccggctctccgcagcgcgtcttcgtacgctatggtcattatccttgtggaatagtggcgaaaacgcggctgccgtggctgcattgcagcccgtcctgcaattagcggcacaacagcatctcaaacgtatttttcttgatgctggcgatgccttgcagcctctgcttgtccgtgtacgcgaaacctcggcagccagcgaaggggatgacccttggcccgggaaagggagcgagtctgaaggcaagcggattcagcatgaaaaccttgatgttaaccaggagctcagtgagcgagagctgcagatattacagctcattgctgacggtcagatgaacaaagaaatcgctcgctccctgactatctctactgagacggtgaaatggcacatcaagaacatctacaccaagctcaaagtcaatagtcgtacgcaagccatgagtcgggctctggaaatgaagttactggattaataatgtcagtgatgtgcgaatataatccataagtgaatatgtcagtagcatctattggccctttaataaacataaattccagcgccgtccgtcgctacgcaactcggtgatgctcagcgggtggatgtcgatacgcgcaaatgagtgaagcggggcgccgagaacgtcgacgatcgtggcgcggattgcggcggcaggcgcaatggcacagtggcgacctcgaatatcgacgtgtttagccagccagctgccacagcgcgccagcagctgagcacgtgactctccgcccgggggagcggcaccctccagccaggcctggaacgcttcggcgtcttgcttcatcacctcacgcactggccgaccggcccagatgccgtagtcgggctccgccagttccgtcactggcgtaccctgtaaagagagcgcggcggcggtttgcctggcggcgacgtccggggcgaaccagacgcggtgataacgggcggcactgctttgtagctggcgagcccgttgccactcccgcgcctccagagggtcatcacagggaaagtgtgaacctctggaggctgccgtttctccctgacaaatcagcgttagcgacgctctcatgttgttaaccgcgccggaaggccgggcgatgttcgcgtgtcgtcggcgtgcgttcggctaaagcaccgaaagccacgccgatgacgccccagagcaccagatgcgtgccgaaggaacttatgcggaaacgccatagcaggtccgccgggaagtggtcggagacttcgttcactgtcggcatcagggcgcaaaccacgagcatcagcgccacggcgaacagcgttgcccacatcatcgcattccctctgccgaggcgcggcgtgagctgatgcgataaccacgcggccgcgatgacgatgccgatagaaagcaacatcatgacgaaatagagtccggtacgatagccgatggtctccgggttgccgactgcgggcggattgggcgggtatttcagacctggcatcaggctcattgccaggaagccagccagcgccaggcacaacgccagcacacgcgggtccgatggcccaaagcgctggtagctaaaggcccacgccagcgccagaccgccgcccagcgcggcgccaaacagcgccatgccggtcatcaggccgatcccggactgggtctgtcggctaaacacctcttcttcttcgccgtctgctgacgcgccgtgatggtgagcgtgagctgacatgcttttttccaggccaatcgcgcgatcgacctgcggctcgccgaaatggtgcgcaaaggcaaatgccaccatcccggccagaacgccggccatcatccctttaaataacagtttgccaatcatttccgcctcctcagtggcagggaaagcccagcagatgacgtgcgtcgtggaagaattcatgcacctgcgtgccggaaaacatcgacgttgcgccttgttctgcgccaacgaaatagatggccagcagcgccagcagggcggtgaacagcgcccagggcaacagtttcgcgacaggaatgggagcagccggggtgtgggcattaagggtgatatcactcatggtgtaactccattatcgattttgctgttgatagagagtgccggactcaccgtgaccggcacgcccggcgaaaggtgatgatggctatgtgccggcgggcaactggcgttcgccagtacaatcggctggccgtggggcgtgttgagatacgctttgcgccactcctgcgtccgtcggctgatttcatccggcaccgtcaggttgagtgccgtcatcatgttttccatcgccgccgtccactgacgatagtaggcatcattcgcgctttcacccggttgcgccggcaccgcgttgatctctttactgaatgtctgtacccattctgcccacgggaacagcccggcccggtggagatggactatcagggagaacgcttttgcctgccagggcttatcaaacaccggcccttcctcatcgcgcggtaacccgagggcggcgtaatcgtgttgtgctaccgtattcatgcttcctccagatagtcgtcccacagatcgatgaacactttgtcagggcgcggctctccccacagcgcctgcgcggtgaaactgacgctgtaaacatgctggggatgttctcccagcccgtgcgccgcagtatctggcgtgataaacacaccgtgagcgatctctatgcgaccgactttatcgcgtgcgtagcgtggcaggcgggtatgggtggtcgggttgaaatttttcgttcgtacccaatcgcccacccggaagcggggcgcaacatcgtgactgacccgagcagacccgccggtgctgacaaccatcgacaccatctcctgcgtcagcacaggtgtaccaggcttgcagggggcaggcttcgcgccaccccacagttcttcaacggtgatcgtcccctttgccagcagcagcgtttcgaatgcatgcagccagtgctcgtagtaacttgactgcaaatattcggtcggcgccatacgttcgatggcgtggcgaaattcatcgacgttaaagtgtccgccgacgaacaacgaggcgaacagaggaaatacccggcgttcccactcatgatggaaatagggctcgttttcctcggtagggatcgggccaaggccgtgcatcccccccagatcatgtatcccgttcatggttttctcctttcgttatggtgcgctaaccacaccggtgccaatcatcgaatcgcgcgtgatgagttcgctcaactgcgcttcgctccagccttccgtgcctgccggacgttctggcaggaccagatagcgcagctcggcgctgctgtcccagacgcgaatctctttgttttctggtatgtgtaacccgaactcggcgagaacgccgcgcgggtcgatgacgatacgcgaacgatagggcgctgatttgtaccacaccggcggcagacccagcaccggccaggggtagcaggaacagagcgtacaaacggtgacgttgtgcacgtccggcgtgttctccacgaccagcatgtcttcgccctgtattccggagaaacccagttcagcaatagcggcagtggcgttttccatcagtcgacgtttgtattccgggtcgctccacgctctggcgacaacctgtgcgccgtttcgggggccgactttgtgctcgtaggtgtcaatcagctcatccagcgcagctgggtcgatcaggcctttttcctgcagcagggattccagtgcgcggacgcgtagctcgatattaacggggggttgggtatggtcgtggtcgtgtttatggctcattttaggcttcccgagagttaaggttaaaacgtccgccagtcaccgcaggcttcgaaagcggcggcggcctgatagagcgtgttttcagcgtaatgacgtcctaccagcatcatgcccaccgggagtccgtcgaccatgccacaggggatagacatggccgggtgaccggtgatgtcctgcgcagcggtgttaccgatcatttcgaaagcgcgcgagatgtattcggtgatggagcagtccgggtctggtatcggctgagcgaggacaggcacggtaggcatcaccagcagatcgaaatcgctcagggcccggtcgtagccggcgcgggcccgacgcgcgatattctgcgctctggcgtagtagcgaccgttatagcgctccagcccatactggccgacgaacatgcaaactttgagcgacggggagagggcatccgcgctgtcgcgccattgcgcgtgtttgtccagcaggctgacgtcgtactggccttcccagttaaaacccatgccgttgccgtgcatcatctgggcggtcagaccttcgcagccgataggcgaccaaagcgcgcccgccagattgtgttccggcacggaaatttcgctaacgatggcgcccagtgcttgcaggcgggcgatggcgtcccgcaccttcgtttctacctgcgggtccatattcggcaactggaatccctcggtcagaatgccgattttcaggccgcgcacaccttttccgagggcggcggtatagctctcaacaacgggcgcgtactgacgcgggtcaagcccgtcacttccggcgatggtttccagcatcagcgcgttgtcgcgcacgttggcggtgatgggaccggcgtggtcgatggtcgcctcaatcggcatgatgcccgtgtaaggcaccagaccgtgggtcggtttcataccgtaggtaccacagaaggcggaagggatacggatggaaccgccctgatcgcagcctatcgccatgtccacttcgccagccgccaccagtgcggcgctgccggaggacgaaccgccggaggaatagccatgacgatggggattgtgcaccggggccgggtcggaagtgtggctgccgccggagaggcagaagtgctcgcaggtggctttgccgagaatcgtcgccccggcatccagcaggcgggtggccacggtcgcgtcgcaggatgggacgaaaccttcgagcgtggaggcgccgttcatcatcggtacgccggcgagcgagacattatctttcagggcgatggtccgcccggccagcgcgccagtcgctgccccttttacctccgttttgtaataccaggcattaagcggattgtcctcgccagtcggacgatagccggcggcgcgcggatagcggacctccgggatatcgtcgggaagggagtcgatcagatcgtaggcgtcgaagttagcctgcatcaccgccagatattcctcggcctgcgccgtcgtcaggctgatatgcagccgactggcaagctcctggagttgttcagcagtgggacgttgaatagccatgttgtttccttttttctgtgtttgctcatgcgcctgtcttgaacataagcccggaatgccatcctgacttggttatccgggtcagtcgtttggctgaaatggacacccgcgcagcctgtgggtgtccgtaaggtgttaagacggcttatcggctttaggccagtggataccgacacttttcatgcctttggtcacgtccatgtccggatgtgagagcaccacgtcgcgatacgaaggactgccgatgaccgcgggcttgaattgagtcaggaaagcggtgacctcttcacgaatatcctgcggcacattgaagttttcgtaacactcgtcgatagactcgaatacggctttccagtgcacttcggtcagccccatgccgcggtgcgcggtcaccatatctcgtccccgatagacggtgttgccaccccagtgcttgcacaagaaatcaacgaagttgatatgctctttctgaaatgaagactcggacacgtgcgcccagatatggccgatgtcgggatgcttcatacaggtcttcaacacttcgcctgcgaaggcgtagacggcgtcatatccgccgagacgttcatagagagacggcttttgctgctgttcgctcatggtggatttctccgtaacatgtgagtggaagggggtgcataggtctctgttcaatcagaacagtttcatcacgcgcagggtggtgtggagatcttccttaaaaccgccatcgacgttgatgtcgcgttggagcaagccctgcacttgcaccgtaggggtgatgaatttcgacaattccagccttacctgatccgaacgcgtcgcttgtccgttttcgacgccgtcgatctgctgtttaccgccccacaatttggcgtaaccggcggagacggtccaggaggtgtctgcgggcggcgtccagcttacccagccctgaaattgataggtgttgtcttgtttgaggcgaccggtgccgatgcccgtggcatcgtcgttgtcgccataccacatcgcatcagcggacagctgcgtggcaaaaccgttaccaagctgctgcacgccgccaagctgcagatcgaacttccagcggttctcaccgacgttgagcgtgcgcccggcatcgtaggaaccggcagggacgtacaggtagggcacgagggcgaaggtggtgctggggttgttcaccagccagaccggggcggccagaatggggtcgcccaggccgctggcggaatcgaggcggacaccgcccagagagccgttataaagacgtccgtagggcatcagcacctgcggcgcgaccgtgaagccccccacatccatatagtggacgtaacgaaagatgctgacgaaggagtccatcccggtgccttgcttaatttcgtcgccacctgtgggggtaaagctgtctcgcgtggcgtaggtgaaatacgccagaatggcatcggtaccggcaggagccgggatgagatcctgtgagttgagatcgaccgcatgggccgggatcgtcgccagccagagtgtgcaggcgaccaggctgatacgagatgtggtgccactaacagtcataacgttaccctcatgtctgatatctcttgtttatttcccggtaccaacgtggccggaagaccttacggttacagatattagggagaaatttgctgcgtacttgtttcataaggacagtcgtttggctggcagggacaacgggcgggcaggctgaaaaggcccatagcgtgatgctccgtcatagcgcagatgtgcacaccttgagtgcggttctcgctttttcgacgccattcgcgacgtgggacgcctggcgcatcgacggagcgtcagtaatatttccgctgccttagcgcggatgcgcgagtgagagcgggagggacatctgagtgctggcacgatagttgctatctgtgaacccgtgtctgttattgatgcgggaattaaggtgcgaggtgagcaattatgaatagcatcatgccgtctgcggtctgctcccactattcgaccattggcgttgccgagtcgcgccgcttcgagtattggaacgacgtggtgttgcgtcactgcattccggccgccagcgtgcccatggctggggtcgactttgacgcccggcttgcggtacgcggggtggggatggtggatatctgttcgttgttcgcgccgttgcaccgctgggaacgcaccgcacgttatctgaggcaggggccagacgacgatctgtggctgggctatatgcaaggcgggtacggccagcttgaacagggagggcgcaaggcggcgctggcggcggatagtctggtgttatacgacgccgcgcagacgttcagtttcagcctgggtgggggcgataatcacctggtgcggatcccgcggcatctgctgagttgtcgtttgccgaggattgaaacgctcaccgctatggtactggacgacagtcggcccggcgtgattccactgcgtgaaatgctgcgtcaggcgacagcgatgcccgcgtgtctggacaacccagatatttctggccgtttctcccagacgatgctggatctactggtgctgagtctggaattgcaggatctggataacgtgagtgctgagcgcgatctgtacgccaggatgatgatttatattcggcggcagcttgtcgatccagatttgaacattgagagcctggctcgggcgcaccatgtttccattcgcaccgtcacgcgtgctttcgcccgccacaaaaaaacgccgatggccgtgatttggcaggagaggctgcgagcaagccgagaggccctcgaacgcggacgagtcagtagcgtgtcccaggcggcgctggatttcggcttctctgatttctctcatttcagccacgccttccgcaaagcctttggcatctcgcctcgctcattattgcccaaagagcagcagggagcgaggccatcgaacaggcacaccgggtcagactcctgagtctgcgcgatatgagtgaaagctgcgcgtgacggaaggcgctcccaggcgttgcggcggcaggtggatgacacgatggcgttagtgttttagcgacgggaaatgatttgaatatcccggcttagcgcggggtaagggtatgggggcgcattgcgcagactcggcttctttaatcgtatttaacataatatacattatgcgcaccaatatagaagtagcaagattatgcggctttgatcagaactcagttaaccatcccgggattctgctctggcccattcagcgcagttttttactttggatgaagttaacctatgttgtcgaccggcacctgacaacgcagatggccgcgcagcgcctgggtatctccgctggtcagtgccggcgtcttctgtcgcgttaccgtgaatctggcccgccaggtatggctaaccgccgtcgaggaaaccccagcaataaccagctgcctgatggttttgcacagtatgcgctcaatataatccgagatcgctataccgactttgggccgacgcttgcatatgtgaaactcgcagaactgcacgatgttcacctgtccaaagagaccgtccgttcactcatggtcaaagccggtctccggatcccccgcaaacaacgtgcgccgaaaattcagcagccacgctatcgccgggcctgctgcggcgaactgatgcagattgatggctgcaagcaaccatcgctggttcgagaaccgtgcacccgcctgtaccgcactggtctacgtcgacgacgcgacgagccacctgatgcagcttcgatttgtaaaaccggaatcgacattcacctattttgaggccacccggggctacctggaaaagcaggatcacattatacgatggtgtaaagaatccacagattggttaagggaagttattatgcttcccttaatgcacactttaagaaagttgcaagctattcatataaggtatatatgaattttattcaataggtaaattgtgctgttttaagaaagatagcttatcccaatagcctctttgaaatataattttattatttactatttgaaaaaaaccgcaacccctcaaacctaatggggcacgccactctaaaattgcccattgtccatcttcgaaaatgttttcaacgatacaaaccatttctggaaaagaaaagtcttgttcaaacattttctttatagcctctttcccaataactggctcattggctacctgatgatttattgcattatcatcatataattctgaaatagtttctacatctgcattattaaatgcgtcaacccattggcaaagtatttcttttggcgtcatataaattacctccagacctgtaaataatccttttccatagcataacatcaaaatcctatcaagctcaaaatttattggcacgctcgatgccatgttcctcgactacgaagcggccaaagattatgcgacccgctccaggctggtcacggcggcgaatatcccttctttcggagcgccagaatgatgttggtctggccggattttcatatggcgggaaccacgttgtgtctcaaaatctctgatgttacattgcacaagataaaaatatatcatcatgaacaataaaactgtctgcttacataaacagtaatacaaggggtgttatgagccatattcaacgggaaacgtcttgctcgaggcagcgattaaattccaacctggatgctgatttatatgggtataaatgggctcgcgataatgtcgggcaatcaggtgcgacaatctatcgattgtatgggaagcccgatgcgccagagttgtttctgaaacatggcaaaggtagcgttgccaatgatgttacagatgagatggtcagactaaactggctgacggaatttatgcctcttccgaccatcaagcattttatccgtactcctgatgatgcatggttactcaccactgcgatccccgggaaaacagcattccaggtattagaagaatatcctgattcaggtgaaaatattgttgatgcgctggcagcgttcctgcgccggttgcattcgattcctgtttgtaattgtccttttaacagcgatcgcgtatttcgtctcgctcaggcgcaatcacgaatgaataacggtttggttgatgcgagtgattttgatgatgagcgtaatggctggcctgttgaacaagtctggaaagaaatgcataagcttttgccattctcaccggattcagtcgtcactcatggtgatttctcacttgataatcttatttttgacgaggggaaattaataggttgtattgatgttggacgagtcggaatcgcagaccgataccaggatcttgccattctatggaactgcctcggtgaattttctccttcattacagaaacggctttttcaaaaatatggtattgataatcctgatatgaataaattgcagtttcatttgatgctcgatgagtttttctgatagttagtctttatagagacacaaacctgaaattccggacaccgcgcttcaggacatctccctggacgccgatatctggcagtatccggacggtactatcgaacgccgggccaacggtactcccctgccctttatgactgacgaccggctatctcacccacgcacttctccatgaaatttagcatcgtcgcggttaatgtcgaaaatttgccacctgacgtggttggcatcgagggtgaaaactgccgtggcgagggtgttctcctcatccggatcgtcggcagccagccggtaaattggcagttcggcgtcatgggtatctgagagaatgttttttgccgccgcggcgtcaaacggaggttgcgtttcccgccactgcacgaggcgtaactgccgcgacgctgaactgtcggtaacgatctgctcaacgccagccagtgccgcatgcaccagatggttggcatgcccggctaccgtcgtcaggggtagaacggagcagccttgcccggtggcctcaacgctgaaaagccgcgcatcgcccagttgcccgagcgtatggtgaaacgccccggatcgcggctggccggtaagtatagtgatggtctcgtcgagggtgttcgcattcagcgaggcgcgagccaggatctgacgcggtaatccctgcggacgatgcactgcacggatgttattcaccgtgttaacgatacctttttcattcaccgcaaaggtgtggccgcaaatcgatcccggataggcaaaactcgtaaagctcagaccgcgactcggagtaatggtagccagcaagcattcatcccgtaactgaggaaaaccgtcttcattatgcgcgataatccgctcgcctgcggcgtttaccccggccaccgtcgtacagccatccgacgttgagcgcaccagatcgccacggcagttccaggcaaagacctgatcaacagtggcctccagtccctgcgccagcccctccagctcctgccagatgtgcggataatgcctctgcgcctcggcgcgcattaaccgggtctcaggggatgcctgcagagtcatcaccgtttgccacaatgacgtgagcatcagtttctgatgccatgcttcacggccaagctcgccaagacgaaggccaatctcaaacggggaaccactgatgtcgattttcttcatgtgatggattcacttatgttcatgaaacgtgctgtaaaaattctttcaggcgcggattgctactggcattcagcaggatatcaggtgggccatcttcagcaatggttccaccatcgataaaaattaatcgagaggccacatcgcgtgcaaagccaatctcgtgcgtcactataaccatcgtcatcccttcatccgccagtgaacgcatcacttttaatacttcatggcgcaactccggatcgagcgcagaggttggctcatcaaacagcatcattttcggtttcaccgccagcgcgcgggcgatagccacgcgctgctgctggccgcctgaaagctccgacggatagtgctcggcccgttcgcccaggccgacacgttccagcagcgccagcgcctgttcgcgggctgccgcttgactcattttgcgtacgcggataggcccaaacatcacattttccagcgccgtcagatgcggaaacagatgaaactgctggaataccatccccgcttcgcggcggatttcgcactcgttgacgtggggatcggtcaggtgcatcccggcaaccagcaaggtgccggaggagatctcttccagcttgttgatacaacgcagcagcgtcgatttacctgaacctgaaggaccgataatcacgaccacttcaccggcatcaattttcagattgatatcgtgcagcacctgggtggtgccgaaatgtttagcgaccgcgctaaattcaaccatgctcataaaatatggatccttttctccagttgcttcagcaggaagctcaggcacagggtgacggcaagataaatcagggctaccgctgtccagacctcaagggcacggaagttcccggcgatgatctcctgcccctgccgcgttaattccgcgacgccgataacaatgaacagcgaggtgtctttaatgctgataatccactggttgcccaacgccgggatcatgcggcgcagggccagcggcataatcacgtgccatagcgttgcgcgctgcgataatcccatcgccagactggcttctttaaatcctctattgatggacaaaattgcgccgcgcgtaatttccgcaatatacgcgccggagttaataataatggtgaccatcgcggccgtgatggggtcaatacgaacaggcagaatcattggtaaggcaaaatagataaacatcacctgtaccataattggcgtaccgcgaatcagctcgacaaaaattaatgataatgttttcgcgataccgcctcccagtgcacgacagattcctgccagcagaccgatgataaagccgcccgtcaaaccgaccatagagatcaatattgtcagctgcagcccctgtaataatagcggcagcgattcccatatatatttcgtttcgaaattcataatgcggtctattactctcggttctggccggggttacccggcccggcggggattatttaggttgcttgttaaaccatttgaaataaattttgtcgtaggtgccatccgcgcgtaatgcctttaacgcggcatcgaccttcggcgtcaggctgctgtttttctgcagggcaaaaccgtatttctgcggcagaatgctgtccgtttccccggtcgattttaccttaccgccacctgcggttttcacgtagtagagcacgttcggggagtcgtgaacgaccgcgtccagattgcctgcctgcaggtcgagataggcgttatcaatattggggaattcgacatagttggctttatatttggatttcataaaactggccgcggcggtgccctgcttcagccccacttttttaccggccagctcgctgaatttggtgatggaatcatcaccacttttcaccgccattaagagatccgcatcgtagtaaccgtcgctgaaatcaacgacctgtttgcgggcatcggtaatggtgatcccggccattgccacatctaaattacgcgattgcagcccaggaattaaaccgccgaaatccatagggcgtaattcgtagctgacattcattttcttcgcaatggcttcccataaatcgatatcaaaaccaacatatttattgccttgcttaaattcaaagggaacgaaggcggtatccacaccgactaataatttatcttgtgccatgacggtaaaactcgccgaacaggcaaccagtgccagggtaatctttaattttttcaataatgcagacataataatcctcagcgtaattaagacagcagacaggagttttcgcgcaataccctaaaactgatattggcgttgagaataaaaacagtatccctacattcgcacgcgatataaaaatgaaggcgtgcgaattatttatgcgggaagaataaaatccctggtgtcgggtactggcgtctgcgcgccgttcatgatcattgaaagaaagctgtaataaccgttgatgccaatcagatcgacaacgcccttttccccccagagatcgattgcctgttgccagatatcatcgctgacttttttatgctgatgcagctgctggcaaaaatggtaaaccacccattcatcagccgccagcgtctctggttgacgccgttcattgattgcctgcaccgcctgcgccgggatccctttttccctggctattggcgcatgaatggcccattcaaccggctgcgaccagtgacgcgcggtcagcaggatggccagttccgacaaccgctgccccagcgcgctacggtagcgcagatactcccccattcgctgcgcatgggccatcagttccgggctgcgcaacaacggttcaaacggcggcagcagcgcgccgcgcggcccgttgataatctcctccgcaagctggcgttgttcatcgctccactgctgttctgacagcgcaggtaaacggttcatggctgacgtctcatcagtttatgcgtctcttcgctgatgaccttgtgcagggtatccaccacgaaatcgagttctgaccggctgacaataaacggcggcgcaatcagaatatgatcgccccgctggccatcaatggttccgcccatcggatagaccagcagcccgtgcgccatgcactgcgctttgatagccgcatgcagcttcagcagcggatcgaatgccgttttgcgctctttatcgcataccagctccacgccggcgaacaaaccgcgaccgcgcgtatcaccgacatacggtaatccgccgagcacatcatgcagcgcctgctgcaaatacgcgccctgctgctgcacctgctcgagcaaacgatctcgctcgataacctgctgcacggccagcgcagccgctgcggctgtcgggtggcagatgtaggtgtgaccatgctggaacattccgctaccggcttgcagcgcggcgacgatttgctcactggccagcactgcgccaatgggctgataacccccgcctaaaccttttgcgatggtcacgatgtcagggacaacgccatcctgttcaaaggcgtgcaacgtgccggtacggcccatgccgcacatcacctcatcggcgatatacagaatgccgtatttatcacacagccgacgaacgccttgcagataacccggcgtaggcggcattgcgccggtggttgcgccaaccaccgtttcggcgataaaaccgataattttttccggcccggcgtccagaattgccgcttcgagttcgccaagtaagcgctcggtatattgctgctggctttcacccgcctcacggtcacggtactcattacaggccgacacgcgcaccacatccatcagcagcggcgcgaactggcggcggcgccactcgttaccgccaacggccagggcacccagcgtattgccgtggtagctttgtttacgggcaataaacagcgtgcgatccggctgcccgatctccacaaaatactggcgcgccagcttcagcgccgtttcaaccgcttccgatccaccggagacgaaataggcatagttcagagaaccgggcgcggtgcggacaagctgctctgccagttgttccaccgtatcgctggtgaaaaaactggtgtgggcgtaggccaaccgatcgatctgccggtgcatcgccgccagcacatccggatgggcgtgacccagacaagaaaccgccgccccgccgcaggcgtccagatagcgttgaccactggcatcggtgatgtaagcgccctgggcactgactgccactgccggggtggtacggaggctgcggtgaatgatttgactcatgcttttatcctgcttaagaaatcgctttcgcgtaagttgaaagcatcttgcaggatccatttgaatctcgtcaattcaataatgattcaaatgtatttaattttcttatgataaaagcaaatgaatcatttatcaggatttatcgggcatcacatacgccccggagcgttgcagataacgttctgcgctctcaattttattcaccgcctccctaccgtggcgggcaaccagcatcgccagcaaacactcggcgacgcccataccggacactatcgaagggaaaaaagaggggctgctgagggagaaaagcaacgtgcagtccgccgcttgcgccagcggcgaaaccggagagtcggtgatggcgataatccgtgccctggcctgcctggcagcattgagaacgtcgagagattcgcgggaatagggagaaaagctggtcaatagcaggcagtcttccgcgttgatctcacgggtgaagacttcgatattactggccagcccgtcaatcagcgacacctggcgattgaacaatcgatagacataaaacaacgaccaggcgataggaaagctggcgcggaagccgcaaatatagacctgcttcgcttcatccagcaacgtaaccgcttgctgcatagcgtgttgattctctgcctgagtgaatgccagattggcctgatgcgcgaggaacacctcttcgtacagcgcgggctgcgtccctttggcgatcaatttttcagccttagatacatatgtatcatttcctaagccgagatcgtcgataaatgcgcttttcagctcccgccaaccgttatagcccagacgctgcgccaggcgtagcagcgtggcaggcttaacgccggcttccgcggcgaaggcgcgcattgattgcaccaccagttggttggcattttgcagggaaaattccgccgctcgctggagttctggcgacagcaggctgaattggctcacaatattttcacgaagattcatggcgtatcgttatcatccgtaagagtggctgcggcgaaaccgggccgcagaaagggatatatataaccataattcgccgtaattgcattatggcagagacggaggctcatctctgcgccacggagtatcgccccaggcgaatgatccgaagcctctttattcggcgcctgaaaccgcgggattcgcaggaacgaccctatacccaactctttgatggcattggcaaaaaacattgtcgccgctatcgcaaaagagaaattattcgctttatttataaattggcttgctaaataattagtcaggttttattacgcagtagaggaattaagatgcgtttcagtaccatgcccgacagtgaaattatttctgaactgtgccgaagaattaaagaaacgcgtatacagctgggcctgtcacagattgagctggccgaacgcgctcaggtcggcgcggcaaccattaaacgcgttgaattaggcgaatccgttaccctcagtacgctgattggtattttgcgcggtctcgatcggctgcatcagctggagtcgattttatttgactcgcacatgcgtacatttaaggcacagctcaatgccggaaccccttcccgtatccgtattcggaaaaaaacgcatcagccaaaagagaaattgcccgccgctgcccagaccaacgaggctgatgccacgattaacgaatggtacacctcatcggcttctaacagcgtggtgtggtcttttacgccgtccgacggagagaaaaaaagctaacaggcttcagatgattttaaagatcagggaagagaaaaccgcctgcggctcaggcaggcggtttttaggggactcaggattcacacaccgcgactttaatcgccagaccgccccgggcggtttcacggtacttggcgttcatatctttgcccgtctcaaacatcgtttcgataactttatccagggagactttcggatcgctggtacggtacatcgccatactggccgagtttatcgccttcactgccgcaatcgcgttacgctcgatgcacggcacctgcacctggccggccaccggatcgcaggtcaggccgaggttatgctccatgccgatctccgcggcgatgcacaccttctccggactgccacccagcagctcggccagtccggcagacgccatcgagcaggccacgcccacttcgccctggcaaccgacctctgccccggaaatggaggcattcatcttgtacagaatgcctattgcgcccgccgtcaggaaatagcgcatatagatttccggcgtcacctctttgataaaacgatcgtaataggccagtaccgcaggaacaatgccgcaggcgccgttggtcggcgcggttaccactcgcccgcccgacgcgttctcttcccccaccgccatggcgaacatattgacccaatccatcgcgctcagtggcgtaatcgactggctctgcggcgccagcacgcggtgcagcgcagaagcccggcgcggcactttcagcggccccggtaaaataccttccgtattcatcccccggttaatggcgtttctcatggtctcccagattttcgccatattttgctcaacgttctcccggccgtggcgggcgatctcgtttttcatcatcacggcggaaatcgacaggcagttgttctggcagtgcgccagcaggttgcgggcagaatagaacgggaacggaatatcaacctccgcctccaggttcttaccaaagttttcctccgtgacgataaaaccgccgccgatggaatagtaagtctggaagtggacgattttgccatcgcaaaacgccgtaatgctcatcccgttttcgtgcagcggcagaaactcattgtgaaagcgcatgcattccgccaccgggaactgtatctcgcgctggccttcttcaataaacagacgatgcatggtgttgacatcgcgaataatgcccggaatggcgtcgatatcaacggtatccggtagataccctgacagaccaagaataatggcgatatcggtatggtgacctttacccgtcaatgagagggaaccatacacatccaccaccagccgagtcactttatgcagcaggcctttttcctgcagggtatcaacaaactgttttcccgctttcatcggcccaacggtatgtgagctggacggcccgatgctgattttgaaaatatcgaaaacgctaatcatatggcacccacgcggttacatagcaaaacggatgcgccaccggtgacaggcggcgctgaaaacttagctgaacagagagaagaaaatagcggagatggcaatcagtcccatcaccaccacaaacgcgttgctgatgtggccgctgtacttgcgcatggccggtactttgttgatggcatacattggcatcaggaacaggatcatcgcgatgaccgggccgcccagcgtttcaatcatccccaggatgctggggttcagggtggcaacaatccaggtggtcaccagcatgaacagcgcggtgatcttgttcagtttgttgatttcgatcgatttcccttttccgcgcagtgacttaatcaccatgccgttgaagccttcacgcgcgccgaggtagtggccgaggaaggatttagtaatcgcaatcatcgcgatgatcggcgccatccaggcaatcaccggcgcgttaaagtggttcgccagatatgagaggatggagatgttctgcgctttcgcttccgccaggttttccggggagaggctcagtacgcagctgaacacaaagaacatcaccgtcagcaccatcatgatgtgggcgaagcccagaatacgggagcatttgcgctcggcgtcctggccatattcttcacgtttagccaccgcaaaagaggagataatcggcgaatggttgaaggagaaaaccatgaccgggatagccagccacagggtcatccacagaccatttcccgttgccgaagcgctgctcagcgacagcgtatccagtaccgcgccgttccattgcgggatcaaatacagcgccaatatcatcaacgcgaacacgaacggaaacaccagcacgctcatggccttaacaatcattttttcgccaaaacggacaatccccatcatgccgacaattaaaatcagcgacaaaatagcgcgcggcggagacaccagaccaagctggtgagtaataaagctatcgacggtgttggtaatagcaacgctataaaccagcagaatcggataaatagcgaagaaataaagcagcgtgataagcttacctgcaccggtgccgaaatgttcttccaccacttcggtaatatcttctcccggatttttgcccgacaggacaaaacgggttaaaccgcggtgggcaaaaaaggtcatcgggaaggcaagaatggccatgatgattaacggaattaaaccgccgaccccggcgttaattggcaggaaaagcacccctgcaccaattgcggtaccgtacaggcccagcatccacacggtatcactttttctccagccgctgctctcgcgagcaacgagggtattttgaacggtttccataatatggcctcagtaatatagagtagggtcaaattaatttgactctgattcaggtaataaaaacgctgtgtttgtttggctattttataaaatgcaactatgctgattcactaacagcgatcacataacctgatttatagtggcaccttttaacgcatcaaaattagtactgaaatcttattattttttaaagtatcatttttaatacgttattatttatatgggtgtgcttaacttgctggatatttatataattcacgtgcagagataacaaccactatttgtcatacgattaatgaaacgcaaaaaatcaggggcaagaaaataaacgccctccccctcaattttcgctaaaagcccttgtagtgctctttactcaggccataaaatgacggacaagaaaggcccgtggcgtagaacttgctttgggcaacagcctctacgaccctgcggattcgatggttaagatgttctttaacgtgctggcaacgtttgtcgaattcgaaggagacttgatacgtcttcgcacgcgcgaagacatggctattccccggggcaaggaaaactgcgggggaagcagtcgacgctgttagataaacagcagaaagagctttgcaggatgcacggaagcggtgaatgctctatcagcgatctggctgaattattctccgtctcccgccccacggtctatcggacgctttcccggggaaataatggaaaaccggatttaataaaaatcagcaaggagcgattatgtacaacaacaatgaagtcatcagttacctacaagccaacaagatttgattgagcccctattcgagcgcgcaggtgcctttgaagcgcaatgggtgtctgattctggcatagcaaatattatcacccggatgattagataatcatgattcaatcactaaagaaatttctactgtggcaactcaggtttttatcatcgttgtacggacctgtgatcctcacgattatttttgcgctgcttcaggggtatttttttcctgagagccctgtttggcctataggcgtatttgccatgattatgattgttgtttttacgcgttattgtaaatggtgacagggtgaatatcactgttatttaaatcatcactgataaggaaattatatgtctactcccgctcatttatgacttgaagatgaaaacggatcgccgattattggcagttgtttaatgtccctgcgtttaggttctatcgaattaaaatcattttcgcatggtgtaaccattccagtagaccccagttggggcaaacttactggaacgcgcgttcatagcccgatcacgatagtgaaagatgttgtgcctaatgacgaagtttctgacctccgtgcagcccatggatgctggcgctggccgacgcacaataagcgcctgaacccggcaaaagagagtgccagcctgctggcacttttaaccttaaactgggtcgataaccgtcacgcgggcacctttaaatagggcgcaatgctcgctaatttctcccgggtttccgtcagttcgcgctccggcgtagattgctcgatgatacccgcccccgcctgtatccagcagcgctggctatcctgaaacacggaacgcagtactaacgccgcatcgaagcgcgtatcttccagcagcaggattgcgcctgaatagagctcccgcggcgttttttcaatttgcatgatcgcgttgagggccgcttttttagggatacctgacgcggtaattgacggaaacagcacggtaaacgcatcccaggcatccttatcttccgcgagctggccgctgacgccagaccccagatgctggacgctgccgcgctggcgaaccgacatcaaatcctcgaccaccacgctgccgggctggcaaaccgcctccagttcggcaatggcttctttgaccgagaggatatgttcaagcacctctttaccgtcgtgcagcagctccctctcatttgcctgattatgcgccatatcgcccatgcgatcgcgggtgcccgccagcggttcagtgaccactttctttcccgtcaccgacatcaccagttccggactaaaacccagcgcctcgcgtccttgctggcgaaacataaacgtacgggtgggcgtgttggcctgtcgtccatatagcagcgtagcgggcatatcaatacgcgctggcagaggaatcgcgcgtgagacgatgactttaacgtaatcgccgcggcggatcgccgaaacggcgcgcgcaacctgctgtttatacgcttcaccgtccagggcggtatccacaaccattggcccgcatggtgtcgccgtatcgacctcttttacccactcgcacagacggcggcatccgtcggcggagtccgcgtaaacggtaacatttcctttctcaaaaataagttcttcacggggagcggttaacgttagcagcggccactcgccggcatcaaaggccattccccgcgcatgagccgcaaagttgaacccaacctggccatatacccggcatcctcttacccgcggatgcgtcataaaacgacgcgcgcagtcggtaatcgaatctaccgcccacttttgttctccggcatcatcaatgaatgtcgcctgggtgcagtcggcattaatctgcagttgcgcctggcatcctctacctatgtaccagcaaggttggcgctcatagacatagcactcttcatctccgaactgacgtaagacgccagaaatcatcggcagccattgctcctctggtaacgccaggtgtaaaaattcactgattttcatcccttacctctctgtgttattcccggatcaatcaattgagcttgtcatcagttcttctgccgaacgcagtcggatagaaacaatccacgccgccagcaacgtgaatacgccggcaaacaggaagcaggccgcatagccaaagcgctgcgcgacaacgccgccgactacgccggccagaatggcgatggcggcgtcagtacattgaaagagcgtaaaatcgacaccggcctgcaaaggcgaagaaagcgccatcagcgtggcgtaaagacagaccaacgcgcaggccagcgaaacagattgaacaacgatcaacccctggagaatcggcagcagtagaggacccggcgctatcagcagcgtcatcactaccgccagcagcgcgatgccctgcacgccataagccgcaaacagcgctctgccgggtgagaggtatttcatcagcaatccacccgccagcgttccggctatgcccgccgcaatattcccgccgctgaacagcgcgccgagcgctgacatgctcagaccatgatccaacagcagcggcgccagaagaggcagcacaaaccgcatgccggaattcagcatcaataccagcattaagcccagccgagcctgtcgccttctaagcgcataacccagtgccggaacatgcggaacagatgctgcgcgcgttggttcggcaatgcgccacaggggtacggataagaccaggatcagcgccgccatcatcagcatggccgcaggccagccgacggtcgccgacagcatcagaaacaccccaccgccgcacatcattcccagatagctgccgccgacctgcacgctgtttccccaaccgtaccctgcgcgggtcagctgatcgacgcaaaaaccgtcgctggcgatatcaatagtggaggcgaccgtacctgccaccataaacagcgcaaatagcgcgacgactagcgtttcgggcaatccgccttctcgccctgtcccgccaatcgcggcggcaatcgccaggatcgccgcgagcgcagcctgcccgcgcaggatcagcatgcgggaacggcgctgcgggctgccaggaggtagccgccagcgctcgacccacggtgcccaaataaacttcagcgcccagggcagcatgaacagggttgtcgccccggcaagcgcaagcgatccgccagcagcgcgcaccagcgcgggcaaggactgcatcgagagcgccgataccagactctgtgtcacatagatgccggcaatggcgaaaatcacccgcccggtggttaacgtcagcggtttcacattcgacggaacgtcactcatgcgccacctcctctgacgtggaacccccttcggcgcgccagacgcgggcggccatttgcgcgtgccacagcgcctggtaacgcccatgaagagagagcagctgcgcatgggtgccctgttcaaccactttgccctcctccatcaccaggatgtttccggccccgacgatggtagacaggcgatgggcgataataatcaccgtccggttgtgaaccaggttatcgatagctttctgtaccgccagctcgctatcgatatccagcgcggcggtcggctcatcaagaatgacgattggcgcatctttcaataaggccctggcaatggaaatccgctggcgctcgccgcccgatagctgtccgcccatctcgcccattggcgtcagccagccttgaggaaggcgggtaatgaattcaagacactgcgccgcgcgggcggcctcttccacttcctgctgggtcgcctgcgggcgcgcaatcaggatattcgccagcaatgtgtcatcaaacagccagacatcctggaaaacgacggaaatcaggctgttgagctgctccgccgtcaggcgacgaatatcgacgccgccgatagaaatccgcccttgctgcggatcggcatagcgcattaacagtttgctgaccgtggttttacctgcgccggaagcgcccaccagcgcgctcatactggccgccggaaaggtcaaagagaggtcattgagcgcgggatcgccgctgtcgtcatagcggtaatgaatattgtcaaagcggatatcgtaacattccggcatctccccgcgttcggcaacgggaagcggcgcgatcgccataaattgctcaatacgctgtaaggcgctggcaatcagttccaccaccgaggtgtagctgataaacatggccatcggttcagcaaaacgcataatcatcgcggcggcggcaatcagaaaggcgaggttcaatgtgcccgtgaccacccagataattccgcataacaccaccacctgtagtcccagctccacaacgccggcgatcagcatcgtcgcgcccgcgctctggcggtgagtgcgggtctgtaagttttccagagcattaaaatgatcccgcagcgcccggcttttatcggcatcgctaccgcaggcacgcaataccatcatcccctgcgcaaattcaacaatatccccgctcagccgctggtgcgcttcgcccagggtctgcatttgtcgacgcatcgccgggcggcgccagtaataaaacggcgccagcaaggggaagatcagcagcatcaccagccccagccgccagtcgatccacaatgtcgccagcgacgccgtcagcggcgtgacgatggtcagcagtaaaatattggctatcgcaatcacataatttaggttttcatccacggagcccagcaacaaggcgttcgtttcgcccgctctgccgcgctggagcctctccagcggcacgcggcgtaattgttcgcccaggcgcaggcgcagctcatgggtggcctgcgccagatgcccgcggtattcaaagcccagcccataccagcggagcgccagcgtcaccaacgccgcaatgctgaaggccaaagcccagtgaagaagccgcgatgcttcattccgtagcagcgcatcaacgatcggatagagacaggcgaaggcgatcccctgcatcaatgccgccagcagcagagcaaccagactgcgccgcagcgttcccgcctgactgcccacgctggagataagctggcgccagatcgcgcgccaggccagattatccgccgggttagtgtctttcattttgcaccgcctcttcctgcgttctacccggcgcccactgctgcgcctgctgatagcgttgccatagccgttgatacaggccaccctgcgccaacagctgcccgtggctcccgctttcccggagctgaccgtcggaaaacagcaatatcacatcggcctgagtcaccatggagagacgatgcgcgaccatgatgaccgtccggccgcgcatggccgccgcgagggctttgataagcgccgcttcaccttccggatcggcaaacgccgtcgcttcatcaagcaccagaatgggacgatcctgcaaaagcgcccgggcgatggtgatgcgctgccgctgcccgccggagagaaatacccctcgttccccgacccgcgtgctgtaaccctccggcaacgcgcttataaactcatgcgcctgcgccactctggccgccgctatcaccgattccagcggcgtatccggcgcgcccagacggatgttattggcgatcgtgtcggcaaaaagaaaattgtcctgaaacacaaacgagatttgcttcatcagggtctctatccgcatatcgcgcagatccacgccgccaatacgaatatggcctttgtcgggatcggcgtaacgcagcagcagccgcgccacggtgcttttcccggcgccgcttggccctaccagcgccacaatttgcccgacaggcacatgaaagctcacctcctgcaacgcggcgccactccgcgcttgcggataatgaaagcttacctgctcaaaggtgatactcgcctcttccggctgtcgatcggctcgcggccgcgagagttccggcatcgcgagaacctgatagatacgctgaacgcttaaacgcgtttgcgcgaccaggttattaagcatcatcatcggcattaccgcttcggccattccgctggctatcagtaaaacggctacccaggcgataaaatcgagactgccagcgtgcagcaggccgtatccgcaccagataagaacgaatatggtcggcagcgggttcagaattgagaatgaaaagcgcgctgaaaatccggcctgtcgataccagcttttgagcacatcgacccactcttcgagggcatgttgatagcgcaaaaagctggtactgccgctatcaaaggtcctcaccaccggcatggcctgtacgaactcaatcaccgcggcgctgacccgttcacgcgcctgatgataacgctgagccatgttttccgagcgctgacgggcgagtaccagcaccaccgaaccaaacgccagtacccccagcgtcgcgatggccagtcgccagtccagccagaatacgagaacaactgtcgccagcggcatgattatggcgcgggcatagagcggcgtgctgtcagcaacaaaaatatgtaacgacttcacatcatccagcattactttcgccaccgatccgctgcccatttgctgtaacgcgcccggcgcaagctgtagggtcttgcgggctaatctgctgcgcagaatattctccagatggaaagccgcataatgagaggtattgaacgcctgcaggcgcaggataaaggtcgctatcacgcagccgactacgccgctcagcggccagacggggatgatgtaaggcgccccgcgcagatcgcgcaggcaccatgccagaaaaagcagcgcccccaggctggtgaaggccgccagccccgccagcgccatagccaggagcaccttccggcgaaccggggtaatcacctgccaaagaggaaatcgggacagcgattcagtattggatgagtgagatgacatgggagtggctgattttcctgatgaatttttatggatgccaaaaacactatttcaaggtggcgttccgggaattaatgtgaataataaccattatcaattactcatctaccccattcggttctatttatacccgcattggtctaagccacagggagataacccggtcatgacggagtcaccacaaacgcaatctgcaatctctgttcaccagctagtggttggaaaacccgcgaacgacggcactattcctgcccagtgtgagctgctgcgctgctcgttgcaggaaggtatggatattttgctctggcggggccactttgctcagcccgagacgttgcagctgcacgacgacctgggcaggattaacttctcttgcattctggaaggcacatcgcgctttgcgatccagggactcagccgccacaccgactgggaactcgcgcgcgatcgtcattacattacccatacgccagactgccgcggcagcgcctcctactgcggccggttcgagagcattacgctctctttcagccctgaagccctcgcgctgtgggtgccggatattagctcggtcattaaaaataagatcgactcccactgctgttgccagcagcagcgttgtaatgccgaaactcacctaacggctcaggccctgcggcacgcgctgatgcggatgcacggcggcttcagtcatgaacaaaaaccgtcgacgttatggctacagggacaaagtctggtgatgctcagcctggtgctggatgaacatcgcgaggacgccagctgttcctcctgccacttcaatccgatggaacgccagaaactgctgcgggcaaaggatctgctgctggccgatttgacgcaggcgccgggggtcaccgaactcgccagagagtccggtttaagcgtgcttaaaattaagcggggatttcgcgttctgttcaacaacagcgtctatggtctttttcaggctgaacgcatgcaggaggcaagaagacggctggccaatggcaatacttccgttatgacggtggcggcggatctaggctatgccaacgccagccatttctccgccgcatttcagaagcagtttggcgtcaccccgtcgaccttcaaacgtctgatctaaccagggcttaccccagaaactcctccgttaacaaggcccggattcgccatccgggccttgttttttgccgaccgtaaaccgaaacgggcacaaataaacccgattcgggtagcgctcaattgttaataataattattctcatataagcaatgcttttggtatgacgtgccatcaggaggaagaatgatttctggcgccccctctcaggatccgctgttatcggacaacggcgaagcggccgattatcaacaattacgcgaactgttaatacaggaactgaatgtagcgccgcagcagttacaggaagagagcaatctgatccaggcgggcctggactccataagattaatgagatggttacactggtttcgtaaaaagggctaccgcctcacccttcgcgagctgtatgccgcccccacgttggcagcatggcgccagctgatgcgcagccgttcgggtgaaaaaccggatgatgcaagctccccggcggaggcggcgtggccagtcatgagcgagggtacccccttcccgctgacgccggtacagcatgcctatctgacgggccgaatgcccggacagacgctgggcggcgtcggttgccatctgtatcaggagtttgccggccattatctgacggcgccaaagctggagcaggctatcacgatcttactgcaacgccacccgatgctgcatatcgcctttcgcgccgacgggcagcaggtctggctaccgcagccatactggaacggcgtcaccgttcatgatttacgccagaccgacgaggcaagccgccaggcctatctggaaacattgcgccagcgcctgagccaccgtcttttacgcgtggaaatgggcgaaacctttgatttccagttgacgctcttgccggacaattgccaccgcctccatgtcaatatcgacctgctgattatggatgcttccagctttacgctgtttttcgatgaacttaacgccctgctggccggagagtcgctgccgcccggcgacccccgctatgatttccgcgcttatctgctgcaccagcagaagatcaatcagccgctgctcgacaaagcgcgcgcgtactggctggcgaaagcatcaatgctgccacccgcgccggttttaccgctagcctgcgaacccgccacgctgcgtgaagtccgtaatacccgacgccgcatgattgtcccgacaacacgctggaacgcctttagccaacgggccggtgagaatggcgtgacgccgacaatggcgctggcgacctgttttgctgccgttctggggcgctggggcggcctgacgcggctgctgctcaatatcacgttatttgaccgccagccgctgcacccggcggttgacgaaatgcttgccgacttcaccaatattcttctgctggataccgcctgcgatggcgataccgtcagcaacctggcgcgtaaaaaccagctcacgtttactgaggactgggagcatcgccactggtccggcgtcgagctccttcgtgaactcaaacgccagcaaagccatccccacggcgccccggtggtatttaccagcaatctggggcgctccctgtacagcagccgccccgagtcgccgctgggcgaaccggaatggggcatctcgcagacgccgcaggtctggatagatcatctggcgttcgagcatcggggcgaggtctggctacaatgggatagcaatgacgcgttgttccctccggcgctggtcgagacgttgttcaacgcctactgccagctgattaaccaactctgcgatgatgaaagcgcctggaagaagccgttcgcggacaggatgccccaaagccagcgggagatacgtcaacgggttaacgcaaccgacgcacccgttcctcagggcttgctgcatgaaggcattttccgcatcgccctccggcaaccgcaggcgctggcggtaacggacgcgcattatcagtggaattatcgtgagctgaccgagaacgcacgccgctgcgctggcaggttaatcgcgtgcggggttcagcccggcgacaatgtcgctattacaatgtcgaaaggcgcggggcagctggttgcggtcctcgccgttctgctgtccggggcggtgtacgttccggtttcgctcgaccagcccgccgcgcggcgcgggaaaatctacgctgacgccaacgtccggctggtgctcacctgccagcacgacgccagcgcctggtcagacgatattccccacctgacctggcagcaggccattgaggcggagccgctagccgaccaggcggcgcacgcgccgacgcagccggcctacattatctatacctccgggtcgaccggcacgccgaaaggcgtggtcatttctcaccgtgcagcgctgaatacctgctgcgatatcaatagccgttaccaggtgggtcccggagacagagtgctggccctctccgccctgcattttgatttatcggtttacgacatttttggcgttctgagcgccggcggctcgctggttatcgttatggaaaatcaacggcgcgatccccgcgcatggtgcgaattgatccagcgtcatcaggttacgctctggaacagcgtcccggcgctgttcgatatgctgttgacctggtgtgaaggtttcgccgacgccgcgccggagaaactgcgggcggtcatgctttccggcgactggatcggcctcgatctcccagcccgctatcacgccttccgcccccagggacagtttatcgccatgggcggcgccaccgaggcgtctatctggtctaacgcctgtgaaattaaccgggtccccgaccactggcgcgccatcccttatggctttccgctggccaaccaacgttaccgggtggtggatgaactgggccgggactgcccggactgggtaccgggcgaattgtggattggcggtatcggggtcgcggaaggctactttaacgatcctgtacgcagcgagcagcagtttgtaacgcaatcgaacgcgcgctggtatcgcaccggcgatctcgggtgctactggccagacggtacgttagagttcctcggtcgtcgcgataagcaggtcaaagtcgggggatatcgcatcgagctgggtgaaatcgaaagcgcgctcagccagctggcgggagtgaaacagtcaaccgttgtggcgatcggcgaaaaagaaaagaccctggcggcctgggttgtgcctcagggttcggctttctgtgttacccatcatcgggacccggcgctgccccaggcgtggcgcgggcttgccggaacgctgccctgctgcgtctgccccccggaaatctccgccggccaggtcgctgattttcttcagcatcgcctgttaaaactgaaaccgggtcaaactcctggcgccgatcctcttcccctgatgaatgctctcgctatccagcctcgctggcgggccgtggtggaacgctggttagcctttctcgtgacccaacagcggctgcagcccgccgctgagggttatcaggtttgtgcgggggaagcgccggagaatgaccctccttctttcagcgggcatgacctcaccttaacgcagatccttcgcggcgctcgccacgaactgtcattactgaacgatgcgcggtggtcgccggaaagtctggctttcgaccatccggccagcgccctgtatatcgaggaactggcgacaatctgtcaacagctttcccggcgtttacagcgcccggtacgcctgctagaggtgggtgtccgcaccgcccgcgccgcagagtgcctgctaacccggctcagcgctgacgagattgagtatgtcgggcttgagcacagccaggagctgctgctgagcgcccgacagcggcttgcaccgtggtctgacgcccgtctggccctctggagtgcagacacgctgacggcgcatgctcattcggcggacattatctggctgaataacgccctgcatcgtctgctgccggaagagcccgggctcctcgcggcattacagcagctggccgttccaggcgcgctgctctacgtgttggagtttcgtcagttaacgccctccgccctgctcagcacgcttctgttaaccgatggtcagcccgaagccttacttcacaatagcgctgactggggggcgatatttaccgccgccgctttcaactgccagcacggcgatgaagtcgagggattgcagcgcttcctcgtacaatgccccgttagccaggtacgccgcgatcctcgtcagctgcagtccgctctcgccgaacgtctgccggggtggatggtaccgaaacggatcttcttacttgacgccttaccgctgacggcgaacggcaaaattgactatcagacgctaaagcgctgtcataccccggaagctgaaaaccggactgaagcggatttacccctgggcgatattgagaagcaggttgccgtcatctggcagccgctcttgtcgatgggcgccgtcagcagagaaaccgacttcttccagcatggcggtgatagcctgctagccaccaggctgatcggacagctccaccaggcgggttatgaagcacgattaagcgacctgtttaatcacccccggctggctgattttgccgccacgctgcgtaaaaccgacctccctgttgaacaaccctttgtccactcccctgaagaacgctaccggcctttcgcgctgactgatgtgcagcaggcttacctggtcgggcgtcagccgggctttgcccttggcggcgtaggctcacacttctttgttgaatttgaaattgccgatctggatattcaccggctggagaaggtctggaaccggttaatcgcccgccacgatatgctgcgcgccgtggtgcgggatggacaacagcgggttctcgaacagactcccccgtgggtgatacccgcgcacatcctgcacagccccgaagaggcgctgcaggtacgcgacagactggcgcatcaggttctcaaccctgaagtatggccggtattcgatctccaggtcgggttcgtcgacgggatgcccgcccgcctgtggctgtgtctggataacctgttgcttgacgggttgagcatgcagatcctgttgtcagagctggaacacggctatcgctatccgcagcagctgccgccgccgcttcccgttaccttcagggattatctgcagcaacccgcgctgcggacgcccaatcccgactctctggcatggtggcaaacgcagcttgatgatattcctccggcgcctgcgttaccgctacgctgcttgcctcaggacgttgagacgccgcgcttcgcacggctctatggggcaatggacagcgcgcgctggcgtcgcctgaaacagcgggcggctgacgctcatctcaccccgtcggccgtactgttatccgtgtggtcaacggttcttgctgcatggagcgcacagcccgatttcacgcttaaccttacgcttttcgacagacgaccgctgcacccgcaaatcaaccagatcctgggcgactttacttcgctgatgctgctgagctggcatcccggcgagagctggctgcaaagcgcgcggttattacagcagcgactaagcgagagcctcaaccaccgcgatgtgtcggcaatccgcgtgatgcggcaactggcgcggcggcaaaacgtaccggctgtcccaatgcccgtcgtctttaccagcgcgctgggctttgagcaggataacttccttgcccggcgcaatctgctcaaaccggtgtggggtatatcccagacgccgcaggtctggctcgatcaccaggtttatgaatccgaaggggaactgcgctttaactgggattttgtcgccgccctgtttcctgacgggcaggtggagcgccagtttgcacagtattgcgcgttgcttaaccgaatggcggaggatgacagcagctggcagctgccgctcgccgacctggttcccccgcttaaggtcacggagcgacgcgcccgccggctgcgccctgagcgcgctcagccgcggatcgcggcggacaagagcagcgtcagcctgatttgcgacacctttcgcgaggtggttggcgagcctgtcgcacccgcagagaacttttttgaggcgggcgccacgtcgctgaatctggtgcagctgcacgtcttgttacaacgtcacgaattcgccaccctgacgctgcttgacctgttcactcacccttctcctgtcgcgctggccaattatctcgccggcgtagccctgaaggagaaaaccaaacgcgtgcggccggttcgccgtcgtcagcggcgcatttgacgcgaaataaactgacttttcccggacgccatcgccaacgcatggcgcgccactgactttgtcaattttaggaaacgggaccgattatggataacttgcgcttctcttctgcgccaacagcagattccattgatgcatcgatcgctcaacgctacccggactgcgaacctgtcgcagtcatcggctacgcctgccattttcctgaagcgccggatggcgaaaccttctggcgaaatctgctggaaggccgcgaatgcagccgacgctttacgcgcgaagcgcttctggccgccgggctggataccgccattattgacgatccttgttacgtcaatattggaacggttttagacaacgctgactgcttcgatgccaccctgtttggctattcgcggcaggaagcggagtcgatagatccccagcagcgcctgtttttacaggcggtctggcatgcgctggagcatgcaggttacgccccgggcgccgtcccccataagaccggcgttttcgcctcttcgcggatgagcacctatcccggccgcgaagccctgaacgtgacagaggtcgcacaggtcaagggcctgcagtctctgatgggcaatgacaaggactatatagccacccgcgcggcctacaaactcaatctgcacggcccggcgttatcggtacagaccgcctgctccagttcgctggttgcggtccatctggcctgcgaaagcctgcacgcaggcgaatccgatatggcggtagccggcggagtggcgctttccttcccccagcaggcgggttaccgctaccagcccgggatgattttctctcccgatgggcactgtcgcccttttgacgcctcggcagagggcacctgggccggcaacggtctcggctgcgtggtgctgcgtcgcctgaaggacgcgctgctgtcaggcgatccaattatcgcggtgatcctctccagcgcggtcaacaacgacggaaacagaaaagtgggttataccgcgccgtcggtggcaggacagcaagcggtcatcgaagaggcgttaatgctggcggccatcgacgacaggcagatcggctacattgaaacccacggtaccggcacgccgctgggagacgcgattgaaatagaagccctgcgcaacgtctacgctccccgcccgccgcaacagcgctgcgcgctgggttccgtgaagagcaacgttggtcacctggataccgcggcgggcattgccggactgctgaaaaccgttctggcggtcagtcgcggaaaaattccgccaatgctgaattttcacacgccaaacccggcgcttaagctcgaggaaagcccctttaccgtgccggtgacggcgcaggagtggcaggacgaagtgcgctacgcgggcgtctcctccttcggtattggcggcaccaactgccatatgatcgtcgcttcgctgcccgacgaactcaacataagctaccccgccgcggatgacggcagcaagagttccgcgctgttgctcagcgccgccagcgacgccgcgttgcggcagctggcagcggactatgccgcggcgctgagggaaaacgcggatgccaacaatctggccttcacggcgttacgcgcgcgccgtctcgatcttcccttccgcctggcggcgccattaaatcatgacaccgccgccgcgctcagcgcctgggctggcgcgaaatcgacttcgcaggtctatagcggccacggcgccagcggcaaacaggtgtggctgtttaccgggcagggttcgcactggcgcactatgggtcagtctttgtaccagcactcaacggcgtttgccgatacgctggagcgctgttttgccgcctgtcgcgacatgctcacgccttcgctacgggaagcgatgtttaatcccgattcagcgcagcttgacaatatggcctgggcccagccggcgattgtcgcgttcgaaatcgcgatggcggcccactggcgcgctgaaggactgaaggccgacttcgccatgggtcactccgtcggcgaatttgccgctgccgttgtctgcggacactataccattgagcaggtcatgccgctggtgtgtcggcgcggcgcgctgatgcagctgtgcgcaagcggcgcgatggtggcggtatttgcgcaagaagaggcgctgatgccgttggcccgtcagttcgagctggatctcgccgccaacaatggcacccggcatacggtcttttccgggccggaagcccgtatcgcggagttttgcgccgcgctttcgcaacacgagatcgactatcgtcgcctgagcgtaaccggcgcggcgcactccgctttacttgaaccaatactcgatcgcttccaggaggcctgcgcgggtctgctcgccgagccggggcaaataccgctgatttccacgcttaccgccgaactcattgacgaggcgacgctcaaccaggcggattactggcgccgccatatgcgccagccggtacgttttattcagagtattcaggcggcgcgcaagctcggtgcccgcgtttttgttgaaatggggcccgacgcccagctgattgcctccggacagcgcgaataccgcgatgacgcttactggatagccagcgcccggcgtaaacaggaggcgagcgctgtcctgaatcaggcgcttctccagctatacgcggccggcgtcaccttaccgtgggccgatcttctggcaggcgatgggcaacgtatctccgcgccatgctatccgtttgcgaccgagcgttactggaaagaacgcgccacctccgcctgcgagcctgccgatgctgtgcttgccgctggattagcggtggccaacagcgccgcgacagcgctcgaactcccccgtctggaggcgcttaaacagtgcgccacgcgactgcacgccatctatgtcgatcggctggtacaacgctgtacgggcgatgcgatagataacggcgtggacgccatcaccattatgcgccatggacgactgatgccccgctaccagcagctgcttcagcgcctgctaaataactgcgtggtcgacggcgactaccgctgcgctgaggggcgctactaccgcgcccgccccattgaacatcagcagcgggaaattctgctgacggaactcgccgattattgtgaaggttatcaggctatccccgataccatcgcccgtgccggcgatcggttatacgacatgatgagcggcgcggaagagccggtggcgattatcttcccgcaaggcgcttccgacggcgtagaggtgctatatcaggaattcagctttggccgctatttcaaccagattgccgccggggtagtacagggtatcgtccaggcgcgtcagccccatcagccgctgcgcattcttgaagtcggcggcggaaccggcggcaccaccgcatggctgctgcctgaactcaaagacgtaccggcgctggagtaccacttcaccgatatctccgcactgttcacccgccgtgcgcagcagaaattcgccgactatgactttgtgcattacgacgagctggatctcgaacaagaggcgcagtctcagggctttgcggcgcagtcttacgatcttatcgtcgcggctaatgtgatccatgccacgcgccatatcggtcgaaccctcgataatttgcgtcccttgctcaagccgggcgggcgcctgctgatgcgcgaaatcacccagccaatgcgtctgtttgatttcgttttcggcccgctggtcctcccgctacaggatatcgatgcccgcgaaggcgagctcttcctcaccccccatcagtggcagcagcagtgccgccgcgccggattctgcaaaatagcgtggctaccgcaggacgacagcccgaccgccggtatgagcgaacatatcattctcgccaccctgcccggccaggagatgtccacgtcatcagaatccgcgctggaacagacgttgccggataaccctgattatctcgccgactggtccgattgcgcaggtcagccggaacggtttaccgcccgctggcaggaggcctggcggcgtctctccgcgcggcacggcgacgattcccccgtgaaaccgcccctcgttaccgccccgcaatggctgggggaggtgcgcttaagctggcgaaacgcagccttttcccgcggcgagatgcgcgtggaagcccgtcatccagacggcaagtggctgccgctggcgcccgacgcaccgcttcctgcgccgcagacgcattatcattggcgctggaggcccctcagcatcgacagtaatagccgcccgctggtattccgcctcagcgccggtacccttgcgctcgaagaggcgctggcgcaatacggcattcttcacgatccgcaggccccttctggcctgatgattgtcgacgagagcgcggagacgctggcgttagcgacgcaggtgaaagaggccctcaccgccagcccaggcggcttgattgtcgtcacccgccgcgcgtggcgaatcgaggaaaacgaggcgctatcagcggcccatcacgcgctgtgggctatgcttcgcgtcgcggccaacgaacagccggaacggttaatcgccgctatcgatatggctgaaaacgcctcgtgggaaacgctgcgtcaaggattaagcgctgtttcattgtcacaacgctggcttgcagcccgggataacggcttctggctcccttcgctggcgcccaatgcgggatgcgccgccgaattaccggcgaaggtgtttgccggcgataaccgctggcatctggtgaccggggcgtttggcggactgggccgccttgccgtgaactggctcagagaaaaaggggcgcgccgcatcgcgctactggcgccgcgcgtggatgcgtcatggccaggcgacacagcggacgtggagattcgcgtctgccgttgtgatgtgggtgatgccggagagctggctcgtgttcttgatgaactggtgaccagcggcggcattgccggagcgattcataccgctggcgtattggctgatgggcccttgcaggaactcgatgaccaccagctggccgccgttttcgcggtcaaagcgcaggcggcaagccagctattacaaacgctgggcaaccacgacgcccgttaatctgattctctattcgtccgctgccgccgccctcggcgcgccaggccagagcgcccatgcgctggcctccggttatcttgacggactcgcccggcagttctcctcccttgatacgccgaaagtgctctccatcgcctggggcgcatggggagaaagcggccgggcggctacgactgagatgctgacgacccttgccgatcgtggcatgggcgcgttaagcgatgccgaggggcgctggcaccttgaacaagcggtgatgcgcggcgccgcctggcgactggccatgcgcgttttcaccgacaaaatgcccccgctgcagcaggccctgtttaacgccgcagcaacagaacacgccgcgattccggccgcgactcccgctgataaccatgcttttcacggtagcatcagcgataaagcggcggtgatgacatggctgaaaaatcgcattgcggtgcagctaagactggacgattctgcttcgctgaacgcagatcaggatctgttacagctgggaatggactcgctgctctttcttgaactcagcagcgatattcaacatgacctgggtgtacgcatcaacgcggaacgggcgtggcaggatctctcgccgcacgggctcacacagcttatctgttctcaggcagagacggcgactgccgtatcgccgccggaagcgttgcagcacgatgccgctgagcgttacgcgcccttcccgttgacgccgattcagcatgcctactggttgggcagaacccatcttattggctatggcggcgttgcctgtcacgtgctgtttgagtgggataaacgccacgatgagttcgatctcgccgtactggagaaagcatggaaccagctcattgcccgccacgatatgctgcggatggtggtggatgcagatggacaacagcgcgttctggcgacaaccccgacgtatcgtatcccgcgcgacgatctgcgcgcgcttcccccgcaagagcagcgccaggcgctggaaaaacggcgccatgaactgagctatcgcgttttacctgccgaccggtggccgctctttgagctggtggtcagcgaaatcgacgattgccgctaccgcctgcacatgaacctcgatcttctgcagttcgatgtgcagagctttaaagtcatgatggatgatttggccctggtctggcgcggagaaaccctgccgccgctcgatatcaccttccgcgattacgtgatggctgaacaggcgcgccggcaaacaacagcatggcacgatgcctgggattactggcaggaaaaactgccgcaactgccttcagcgccggaactgccggtggtggagacaccgccggaaaccccgcacttcaccacgttcacttcgacgcttgacaggcaagagtggcaggcggcgaaacaacgctggcagcagcagggcctcaccccctccgccgcgctgctcacgctgtttgccgccacccttgagcgctggagccgtaccacggcatttacgctgaacctgacgttcttcaatcgccagccgatccacccgcaaatcaatcagttgatcggggattttacctccgtcacgctggttgattttaacttctcaacgccgctaacgctgcaggagcagatgcaacgaacccagcagcgcctctggcaaaacatggcgcacagcgaagtgaacggcgttgaggcgatccgcgagctggggcgccagcgcggatcccagcgtcaaccgctgatgccggtggtgtttaccagcatgctggggatgacgctggaaggaatggctatcgaccgggcaatgagtcatctgttcggcgaaccctgctatgtctttacgcaaacgccgcaggtctggctggatcatcaggtgatggagagcgatggcgcgttgacgtttagctggtactgcatggacaacgtgctggaaccgggcgcggctgaagcgatgtttaatgactactgcgccatcctgcaggccgccattgccacccctgaaggcctgaagaccatggacagcgggattgccgaacacattccccgccgccgctggccgctgaacgcgcagacagactacgatctgcgcgatattgagcaagcggcgcaggaataccccggcatccaacaggccagagcggaattaagcgaaaatggcgcgttaaccctggatatcgttatgaccgaggatccaccgccctcagcgccgttacatgatgagcacgatctcgcctcactggcgctgccgttgcctgaacagacgcaacttgacgagctggaagcgacctggcgctggctggaggcgcgtgcgctgcaggggattgccgccacgctacatcgccaccgtctgttcaccaccccggaggttgcccacccatttggcgaaatagtacaggcgctgagcgcgcaagcatcacaccggcgcctgctacgccagtggctgcagtgtctggcggaaagagaatggttagtgcgcgagggggatagctggcgctgccgcattccgctcagcgaaattcccgagcctcacgaagcttgcccgcaaacccactggagccaggcgctggcgcagtatcttgacgcctgcatcgcccggcacgacgacctcttctccgggcagtgttcgccgctggaactgctgttcaacgagtcgttgcgcgtaaccgacgcgctgtatcgcgaaaaccccgccagcgcttgtctgaatcgctataccgcgcagattgccgccctttgcggcgcagaacggatcctcgaggtcggcgccggaaccgcagccaccgcggaaccggtgctgaaggccacgcgaaacacgcggctgtcataccacttcacggatgtctccgcgcagttcctcaacgacgcccgaacccgtttccacgatgaatcgcgggtgtcttacgccttattcgatatcaaccagccgctggattttaccgcccaccccgaggcgggttacgacctgattattgccgtcaacgtgcttcacgacgccagccatgtcgtacagtcgttgcgccgattaaagcggttgctgaaagccggcggacgtctgctgatcgtggaagcgacggaacgaaacagcgtattccagctggcgagcgtcggctttatcgaagggttaagcggataccgcgatttccgccgccgggatgaaaaacctatgctcacccgttcggcatggcaggaagtgcttgtgcaggccggttttgccaacgaactggcctggccgccgcaggaatcgtcgccgctgcgccagcatctgctggtcgcacgttcgcctggggtgaatcgcccggataaagcagccgtgagccgctatctgcagcagcgttttggcgcgaccctgcccgcgttgcagatccggcagcgagaaacgttatttactccgctatcggccccgcctgacgcacagattgcgccagccgaatcgacaccgagctccgggggagatccggcgctggaaaaacaggtcgctgaactctggcaaacgctgctgtctcgccccgtggccagacatcacgactttttcgcgctgggcggcgatagcctgatggcgacaaggatggtcgcgcagttgaaccgcagagggattgccagcgccagccttcaggatctgttcacccattcaacgctcagcgacttctgcgcccatctgcaggcctgttcgtcggcagaggagaatcctgtgcccatttgccagggcggtggcgacgaaacgttgtttgttttccatgcttcagacggcgatatcagcgcctggctgccgctcgccagcgcgctgaatatgcccgtttttggcctgcaggcaaaatcgccgcagcgttttgccacgcttgatcggatgatcgatgagtatgtcgcgagtatccgccgccagcagccgcacggcccttatgttctggcgggttggtcgtatggcgcttttcttgcggcgggcaccgcgcagcgcctggatgccaaaggcgagcaggtacggctggcgttaatcgatcccgtgtgtcgacaggattttcgttgcgcaaaccggacggccctgctgcggctgttagccgaaggcgatacgccgctggcgctgccggaacatttcgatcggctgacgcccgaccgccagcttgccgattttatcgaccttgccagaacggccggaatgatggcgcaaaacctgacgctacaggcggcggaagcgtggatcgacaacatcgcgcatctgctgcgcttactgaccgagcatacgccggacgaaaccgttccgctcccctgtctcatcgtgcatgccgcgatgagacccgcgcgctggacgccagcggaaaccgaatggcaaacctggatagaccgcgccgacagctatgcgattaaagccagccattggcaaatcatgctggatcccccccacgttcagacctgtgcgcagcatatcaagcgctggctcggcgcaacctcaacgcaaccggagaacacgttatgatgccgtccgccgcccctaagcaacgcgtactgattgtgggcgctaaatttggcgaaatgtacctcaacgcctttatgcagccccaggaggggctggaactggttggtcttctgtcccagggaagcgcgcgatcgagagagctggcctgtgcgtttggaatcccgctgtatacctcgccggaacagatcgccgagatgccggatatcgcctgtatcgtcgtgcgctcaaccgtcgccggcgggagcggaacccagcttgcccggcactttttgacccgcggcgtgcatgtgattcaggaacatcccctccacccggatgacgtccgttctttacaagcgctggcacaggaacgaggccgctgctattgggtcaacacgttttatccgcacgcacgtgcgggtcgcgcctggctcggggatgcgcagcggttacgtcgcagcctggatcaggcgccgtcggttgctcacgctaccaccagccgacagttgctctactccacgctggatttgttgttgctggcgctagaggttgatgccgccagcgtggcgtgcgaagtggtcggtagctttagcgactttcactgtctgagacttttctggccggcgggagaagcctgtctgctacttcagcgctatctcgatcctgacgatcctgatatgcacagcctgataatgcaccgtttgctgctgggctggccggaaggtcatctttcgctggaggcaagctacggccccgtggtctggtcatccagcctgtttgtcgcagaacatcaggcgaatgttcgtagtctctaccgcaggccggagatcctgcgcgacccgccgggtcagacgcgcagcgcggctcccctgagctggcgtgattgctgtgaaaccgccggaccggagggggtcggcaggttgctacagcagctgcgctgccatctggcgggcggaaatctgcccgcggcctgccactcagctcatcagctggcggtgtcgtacctatggcagcagattttacgcgcgaccggcaatgccgagatccgacacctgaagccgccgcgtcacgaccggttaacggctttctaccgccacgatgaggagtcccggtgatgcaatttgccatgtgtataccgttatggcccgcccgcaacgccagtacggcgcatctggtgatgtgccccttcgcgggcggcagcagtagcgcgtttcgccgctggcgagaccaccccatggcggagatcgcgctttccctggtgacctggccggggcgcgatcgcctgcgccatctggcgccgctcagcagcattacgcaactggcgtcgctgctggcggacgaactggaagagagcgtatcgcctgacgccccgcttttacttgccggtcacagcatgggcgcgcaggtggcgtttgaaacctgccggcttctggaacaacgggggcttcgcccacaagggctgattatttccggctgccatgcccctcatctgcattcccggcgcaggctcagcgaccgcgatgatgccgactttatcgctgaactgatcgatatcggcggatgttcgcctgaactaaaggaaaacaaggagctactgtcgctatttcttcctcttctgcgcgctgatttttacgctactgagcactatcactacgactctctcgacgattttccgccgctgcgcacgcctgctctgctcgtgtgcggcagccgcgatcgggaagcctcctggccggagatggaggcctggcgtccgtggctgaaccatatcgcaggcgaggtggtgattgacggcgaccatttttatctgctgcaacaatccagggccttttttacgcagattattcaccattttccccacgtattttctgcgacgaccgctttgcaaaatcggtcctgcacttcagaaaggtgacgcatgcactcttcctttgattctctgataaaacagtatcccttccccattgctgaacagctgcgccactgggcggctcgctatccctcgcgaactgctgtcgttgatgccaaaggctcgctgacctacagcgcgctcgatcttcgggtcgatgagcttgctgcagggttatactcgctgggtttgcgtccgggagaacatgtgcttatccagctccccaacggcaacgcatttgtgatcctgctgttcgcgctgttaagactgggcgttatccctgttctggcgatgccctcgcagcgggcgctggatattgacgcgctgatcgcgctggcgcaaccggccgcttatgtgattcacggagaaagccacgcggacctggcccgccagatggcgcgcaaacacgcctgcctgcggcaagttctggtcgcaggtgagaccgaaggcgacgattttacgccgctcttctcgctgcgcggcgaacggcaggcgtggccgcagcccgatgctgccggcaccgcgctgctgctgctctcaggcggcaccaccgggacgccaaagcttatcccgcgacggcacgctgactatagctataacttcagcgcctccgccgaactgtgcggccttaagccacagagtgtgtatctcgccgtcctccccgtggcgcataactttccgctggcctgccccggtattctgggaacccttgcctgcggcggaaaggtggtattgaccgacagcgccagctgcgatgaggtgatgcctttaatcgctgaacaaggcgtgacccacgtcgccctggtaccggcgctggcgcagctctgggtgcaggccagagagtgggaagacagcgatctctcttcgctacgcgtcattcaggtgggcggcgcccggcttgacccaacgcttgctgagcaggttatctcgacgtttgattgtcccctgcaacaggtattcggtatggcggaaggcctgctctgctttacccggttggacgatcctctggccaccgttctccacagccaggggcgccctatgtctcccctggatgaaattcacgtcgttgacgaagaggagaacgacgttgcgcccggcgaaacgggacagttattaacgcgcggtccttatactattacgggctattatcgcgctcccgagcacaatgcgcgggcctttaccgcgcaaggattttaccgtacgggcgacaatgtcaggctcgatgaggcgggaaatctgtacgttgaggggcgtataaaagagcagatcaaccgcgccggagagaaaatagccgctgcggaagtggaatcggtgctgatgcgtctggaagacgtaaaggattgcgccgtggtcgccgcgccggacacgctgcttggcgagcggatatgcgcgtttatcatcgcgcaacgcactccctctgactatcaacagctgcgtcaaaagctggtccgaatgggaatcagcgcgtggaagattcccgatcaaattgagtttctgacccactggccgctcaccgccgtcggcaaggtagataaaaagcgcctgacggcgctcgccattgagcgttatcgccattcagcccaataagcgccccgctacccgaaacaggtggaaataaacccgtttcgggtagcagtgcaattagaaatagttatcattttcaattcaccattatcggtattttggcgtctcgccgtttttcagggattcataacaatgaaaatgacacggttttatcctctggttctggggggatttttactcccggccgctgctcatagccaaacctcacagcaagacgaaagcacgttggtggtcaccgccagcaaacagtcttcccgctcggcatcagccaataatgtctcttctaccgttatcagcgcgacggagttaagcgacgcgggcgttaccgccagtgacaaactccccagagtgttgcctgggctgaatattgaaaatagcggcaacatgcttttttcaacgatctcgctacgcggcatctcttcggcccaggacttttataaccccgccgttaccctgtatgtcgatggcgtcccgcagctttcgaccaacaccatccaggcgctgaccgatgtgcaaagcgtggagctgctgcgaggaccgcagggcaccttatatggcaaaagcgcccagggcgggatcattaacatcgtcacccagcagccggacagcacgccgcgcggctatattgaaggcggcgtcagcagtcgtgacagttatcgaagcaaactcaacctgagcggcccgattcaggatggcctgttatacggcagcgtgacccttttacgccaggttgatgacggcgagatgattaacccctcgaccggtagcgatgatttaggcggtacccgcgccagtatcgggaatgtgaaactgcgtctggcgccggacgaccagccctgggaaatggggttttccgcctcgcgcgaatgcactcgcgctacacaggatgcctacgtggcatggaatgatctcaagagccgtacgctgtctctcggcgagggttcaccggacccgtacctacggcgctgtactgacagccagacgctaagcggtaaatacgctaccgatgactgggttttcaatctgatcggcgcctggcagcagcagaattattcccggaccttcccttccggctcgttgatcgtcaatatgccccagcgctggaaccaggatgtgcaggagctacgcgccgccaccctcggcgatacgcgtaccgtggatatggtatttgggttgtaccggcagaacacccgcgaaaagctaaattccgcctacgatatgccgacgatgccctatttaagcagcaccggctataccaccgctgaaacccttgccgcctacagcgatctgacctggcatttaaccgaacgttttgacatcggcggcggcgtgcgtttctcgcatgataaagccagcacgcagtatcacggcagcatgctgggaaacccatttggcgaccagggtaaaagcaatgacgaccgggtgctcggacagctctccgcaggctatctgctgaccgacgactggcgggtatatacccgcgtcgcccagggatataaaccttccggatacaatatcgtgcctaccgcaggtcttgatgccaaaccgttcaacgcggaaaaatccatcaattatgaaattggcacccgttacgaaaccgccgatgtcacgctgcaagccgccaccttttatacccacaccaaagatatgcagctctactctggcccggtcggaatgcagaccttaagcaatgcggggagagccgacgccaccggcgttgagctggaagcgaaatggcggtttgcccccggctggtcatgggatatcaatggcaacatgatccgttccgaattcaccaacgacagcgagctgtaccacggcaaccgggtgccgttcgtaccgcgttacggcgcgggaagcagcgtgaatggcgtgattgatacgcgctatggcgcactgatgccccggctggcggttaatctggtggggccgcactatttcgatggcgacaaccagctgcggcaaggcgcctacgccaccctggacagcagcattggctggcaggcgacggaacggatgaatatttccgtctatgtcgataacctgttcgaccgtcgttaccgtacctatggatatatgaacggcagcagcgccgtcgcgcaggttaatatgggccgcaccgtcggtatcaatacgcgaattgatttcttctgatccaacgatccagggatgcaataatcgcatccctgtcatcaccgaatttaactcgttgacgtccggaaaacgcctgggacaaccccagccagcaacaaaacctatattgtcactggccggccttgaagataattccatcggcctgctgctgccgaaggaattcagcgcttacttcgccggaataatcagcacctggcccggatagattttatcgggatgcgtcagcatcggtttgttggcttcaaaaatacgttgatactcattggcggagccatacatcgctttagagatggcgctcagggtgtcgccggatttcaccgtataataacgactttccgccccgctttgcgccaccttcacgctgtcattaacctgaccaacgccggtgacgttacctaccgccaccagaattttttccttatcttcttgcgaaccgacatcgccggtaaccgtcgcggtgccgtcgtccgcaacatcaatattgaccttttcggcaccaggcagattaagaccatcaatatgttttttcagcttgtcggccttatcttccttgctgccgccggagacggcgtcccatattttctcgcccgcttctttgacaaaatttaataatcccatcgttccatacctccattactgtttcacgatcaaatattcatcagaccggttaagcccatttccaggatgtcggttctgctaccccagagcggcaaccgcctgaagcagcacaacctgccatcaaagtataatcaataagcgtcaacgtgcaggatatttgcccggatacggcaggaaaatcggtactctgcccagtgggcatggcataaaatcaggcgttaacccgcagtgatggcgaaacggctcaggtcgggacaatcagctgcaggcctggatagcgctgcagccagcgtttttccgcgacgcgctggcggaaaatagccagcttatgctgcgcaaataccggcgtgggccgcagacggagtgcaaacagatcgtccagcccgtagggcgcaataacctcaataagccctgaacgtcccattctgaccgcgatagccgtcgccgtttcaggccagtacagcaacgcattctccgtggagtgataaggtttattaccgttacgttgatgcattctggcctgattcttcaccgaccagttaaaggcggatgattgctggctcagcctctcttccagcaccctatcgtcggcggcgctgccgcttttcgcgtcgaaccagacaacatccacatcacccgagactggcctttgcccgtagccgtgcagatgatcccagaccgcatccctgacaaagccggcgccaatccagccatcgctgagttccagcgcctgaacggcgtacagcgcgttcattcttaccgggtcgtttaacaataatctctgcaatgcgtcctgatagttcatgatttccctgaaacggcgatcggtccgctaagtgtatcagcgttcaggaggcgccgcttcaggcgccccctgttattggggtcagtttggatatcgaaaattattttacgttttaaccacttagatgtgagaaaaccgctctctgagcggattttcgtatcccgatgagcgatgctaatagctcctctcaaacgatcttaagaagatccttctgaatctttgatcgtgatagtgtaggttttgtcgaaatcgcctgattttgaaagcattccgccacctaagccgccatgtactcgtactttaactatacctgcttttgttggtatccctctaatctggatgcaattattgaattcatcatcatcacaatactgtaggtggagacctaaattatctggatgaatatctcctgcaatgacctgcttaccataaatatcataagaaagaactattccgccaaatatatttatttggttatagtagggagtaccaacaattgcatcattaagaatctccccttctggagtaaactctgcctgtaacgaacaggcggaaagtaaaagtaaagataaaacaaaaaatatcttccccatgtttattttaatggtttaaaaaccatccctccaaaaaatctcttgataaaaaattgcaaatcttttttaggttttatccaatttctttgttttccccaagaaaacaattccaaactaatatatccgttgggatcttgtgtgactgaaccattccagacgacccagtgtgtaggtaaaattgttttatttgtactatttacaagaagtccatcgtttattaatgtaacgactttatagcctcgctcaatatattgatttaaatctctgattccctggacacccgcctgagtgattcctacattactaaagactatttcataaccggccttttcaaaccattccgtcagtgtttgccacattgtgatgccagccactggcgaatcaagagcatcaaagctcagcatggtattctctgaatccctgagcccagctagtgtcatccagtcagtaccggctatctttggcctgccatcatcatagtaaaatgcacctgtagggtgacgacagccttcaccaggtgagatgattaagtcacctattttagttttcccgtaccgccaaagttcacgggcagcttgcgcatacacatcggggcgatccttttgcaaacagtaaaaaaatgcagcaggcccacatacacttgctgctatttgattagggaaatcaaatccgttaaatctttcatctatttgacgttctattaaatttttatcaaaagggtctctgggattgccaatggggtattcctttgcaataaatggacgttccgggatggtgattttaatctgctttgtttcgcccccctgactctcaggtttcattgtcccttttgactcaaaataacaggggttctcccgcttcaccggagaccaggctttgcccgacgcaaattcttccagcgtgtacatcttagtgaacggaacaggcgttacgcagtgcgtatgcaacatggtttttcggtaaagattcatttccataatataaattgtcgagagtgactcatttatatttccggtcatgtgactctgtgtttcataatttcccagaaacggctgttgcttcacatccacaaggggcgatttattcctgctggagtccatgcgataaatgcacaggtcatataacaaagcatcagccgggacattagagttaatacgggtactgagatagtaaacagccataattaatccattaatatatgcaggttaatattttcagcagattcagcataatgccatccggtaaccccgtgttcatcggtaacaccagcttcagaacgtccgtccgggaacatcagagtgtagcggcaaccagccattagctggccatcgtcaccggcgcactgaaagcgaatacagttccgggcaccggaatcctgtgcctgttgcgccgggacagaggactgactggtattgcgggaggtcagagagccggtgtctgtgctggtatactgcgtggctgaaccgtacacgtagtgatctgggcaacggcacagcactctgtcacctgtggccgcatacgctttgccttcttctgcccagtcctgcgcggaggccagaatttcaaaatacccgttacatttactgcatgatgccttgtcgccggtccgggctattgctttacttccttcaaaccaggacgcagtcgctgaaatgatttctccgtaactcgttttatcacccaaacaggccagtgctcttgccattattaatccctcaatatataagcggttatactcaccggcatcatacaacaatcacaacttaaccaaaatcttcggcttctggttgccggtacagtgcctgaatgcggcatatctgggaggggcagtaccctgtcgcatctgccgtttcacggatgctcagtttcttgacctgccggtagtacaggactttctgatgccgtcctgatcggcctgttttcaccggtatttacccagtgtatgcgcccgttcaataccctgcttttgtcgctggcggcggcccagccagtccttatgcgacatcgcggccatcaggtcgataagtatgtcattgatgtcggttatcacggcgcgggttattgggtcagcctgcgaaggctccttatctgacagagcctgctatgaggtgggcacatccaggctgacaatccgcagcacgtgttgctcgatctgctttttcagcctcatccagtacattaccagccgtatgcccctgcttcagtccagacttgaagaggtcaatgccatggctgcccttggtgagctgcccgatatggaaatatctgacaagggaggggtaaaagtctccccgctggataactgcgtcccggtgcaggtttcacagctgccagagctggtttacagcatgctaccgcaccctaaaatcacggaaattctcgatgaggtaaacagctggacgacgtttacccgacatttttcgcatataaaaaatgacattacccatcccgatacccgcctgctcctcaccaccatccttgcgaatggcgtcaatattggtctgaccaaaagccccggaagcaccaaatcatcactggaagatatccagccatggtacatccgcgacgaaacctattcagccgcccttgcagagctggtaaacgcgcatgggtaaagaccactggcggcattccggggagacgggacaacgtcatcatcagatggacagaatttcagaacaagcagctcaggcagctacgcagggcaggttaacccgaaatatgggcaggagcctggacgtcagttttatacccatatatcggatcaatacagcccgttttacacctgtataatcagtcgggtcagggattcaacccatgtgctagatggcttgctgtaccacgaaatgactccttattcacctcgcggctacgcttcgtacgcagcgtgatggaaatcaatttcccactgcagcacatcgccgtaaagcgccgatagcgcctgcttttcgctttcactcagcgccatggcgcagcggtcgagttcgttcttcagccagagcgcctgctgataaaattcgtcctccgcgtgcatttccacccagcggcgcacgtccgcatcgctctggtgatgttcgctcgcccgtcggcaccagaaataatacatccactccgcaccgaacatcagggtaacaatctgctcatagcttccctgccgggccgttcgcagcatgccgtcgcgaaagcgccgcacgccgggcagatcgtccggataatcagcgggagttatccgccgttctgataacacctgttcaaaccatgcaatctgcgtgtcaaccagggcattcaggacgccaataagccagcgctgctgatgaatacccggcgccttgctaaccccgagagcaaaaatcgcgattgccgtcgcgacaaagttgccctcaaacaccagatagcggttaaagacggctgtcggcagacgatcctgttcgatatcagtcacaaaacggtgctgctgcatcgcctgccacgccggttgatgttcgcgcagcaggcgttcgctaaacgcttccattatgcttcctccagcgcggcctgagcgaccgacataaaatgcttcacccgggccagctcaacatcgttccaccagacgccatcgaccttcatcgtactggccacaatgaccccctgggtccgcccgaggatctgactcacgttggcgggcgtcaccccggagcccaccagcagcggtagctccgtcgccgcgcggatctcgtcaatttcctccatcgttgcgctatcgcccgtgcgctggccggtcgcaattaccgcgtcggcctcgaagaaatccacgtcgcgcgtgagctcctgaatcgaacgatcggcaacgatggcgtggctaccgtgcttgacgtggctatcggcaaagacgcgaatatgttcagcgcgcagcatgctgcgatagcgcagcgccttagcggccgccccttcaataaatccttcgttggcgatataggcgttggcccactggtttacgcggacgaaatcggccccgcccgccagggcgatcgccatcgccgggatcgccgcgttcgccaggacattaatgcccagcggcacaccaaaacgctcgcgaactttctcggtaatcaccgccatcagcgcagaggtttcatgaccgatatcctcaggtttggaaaaaggaatatcaccatgattttcaataatcaggccgtgaacgccgccagaaatataattttcggcatcgcgaagtgcacgctcaacaataccggggactgatttgcctcgatatttcggcgtaccgggaaaaggatcgcaatgaataacaccaataacaactttattacgtgaaaaaatagcttgtattgcattcgttttttctgctgagatagcaaccatcttatccatcctgttaagggaacactatgcgtgtttacgttactggtaatattaccgtagatgaaacctggtccattccggatataccgaaaaaaggcgtgtccattcacggcattaaagtttcgcaggatatcggcggtaaaggcgcgaatcaggcgattatattatcccgctgcggaatcgacacgcgattaattgccgccacgggaaatgacagcaacggcgagtggatccgtcagcagataaaaaatgaaccactgacgctactacccgacgcccatttcaatcaacatagcgacacctcgattattttaaatagcgctgatggcgacaatgccatcattaccacgacggccgcagccgatacgttcagccttgatgatattattccgcatatggcggaggccgctgcgggcgatattctgctacagcagggcaatttctccctggataaaacccgggcgctgttccagtacgccaaagcccgcggtatgacaacggtattcaacccctcgcctgtcaatcctgacttttgccatctgtggccgctcatcgacatcgcggtggtcaatgaatccgaggccgagcagcttaagccttacggcgtgaaaaccttagtggtaacccagggcgcggcaggcgcctggctggttcaggcgggtcagcgccagttttgccccgctgtccccgccgaggcgctagacaccaccggcgctggcgacacgttcctcgcggtgatgctggcgtccgcgattctgcgcggcgtcgcgccggatgcgctggcgctggcgcacgccagccgcgctgccgccattaccgttagccgtcgggggacgctcagcgcgtttcccgacggccacgaactcaccgctctgttagccgtgaacggcgcgcgctgacctacttgaacagcgaacgataggtatcgacgttcgctttggttaccaccgtggccggaaccagaatggttttcggcacggttttacctgcagtgatagcgttcagcgcattcagggcttcggcccccatcttttccgggtcctgctgcagaacggcggtgacgtagccgccgtcaataccggaaatcgccttcgccgtcagatcccagccaaagactttaatatctttctggcgcccctggttttccacggcggcgatagcacccagcagagcgggttcgccagtggcatagatcgccgtcagatcggggttgccggtaatcaggttctccgccgcggtcattgctttatcctgtacgttctggccgtcgacgacgttagcgatggtaattttcggattgcttttcagcgtctcttcaaaccctttctgccgctggttctgaatggccgagttcagcgcgccgacaatacccagccgcgcctggccacccatctctttctgcacgtagtccacgaagtattgaccaataattctgccaccttcgatattatcaacgccgacctgagccgcctgcggcccggccggtaatacggcatcaatcgcaatcactggaatgttagcggcggccgcttcttttaccgcgggcataattccgttaacgtcgatagcggcaaccagaatgcctttaacgccttgctgaatatagttttctatcgcgtcgttttgcgccacgggattatcgttagagttaaaaataactaaatccttgccgctggctttggctgcatcctgcgcgcctttattcatcagattaaagaacagggcctgctgattgatttgtaccagcgcataagtcggaccggcggcgccggcggcagaaataaaactcatggatgccagcatcgtggtggcaacagcaagtaaacgcagttttccggtgtgaaataacatcatcagtatcctcgtcgggaatagttgatagccagcagagttccgcgccgcatgcgaacgcagaaggattattttttggcgggcaaatatcgtctatatggccagaacaatcatcgaccgttcggcggatacctgcttaatttcattccggcaaccggtccgtgtcggtgcgcgactggaatgagttaaacgggtttgggaatgacttcccggatgatgcggtaaactgcctatacaattctccgcagattaaattttgtcaagcatttatttccagttattgttagcagagaaattgctgtatccaccgcgcttaactatgttacagatagccgattctggcagaaatggcgcaggaaatgagtataaaacgcgtattgttatccgatgtggcaaagctggcggggctgtcgaaggcaaccctgtcgcgctatatgaacaacagtattgtgctaccgcaggacaccatcgatcgcatcgaaaccgccattcgcgaactggactatcgcggcaatagcctggcacgccgtcttagcaaaggcggcagcgaaacgctcggcctggtgctccccgatattaccaaccccttctttgccgaactggccgatgccgccgaagaggccgcttctgtcagcggttacagcctggtgctgtgtatcacccgcaacaacccggaaaaagagtgccagtttatccgctggctggatacctgccaggtcgacggcctgctgttcaccaccaaccgccccgataacggcctgctgcgcaaagaagtccagcgtcacgaacgcattgtcctgctggatgaagatattcccggcagtaaggtgccgaaagtgtttgccgataacgtccagggcgggcggatcgccaccgaaaaactgatcgccgccgggcatcgccatatcgctttcgtcggcggcccggacaagctgatgagcgtacgcgagcgctatcagggcttctgcaccgcgatggagcaggccggcctgagctggccgcccgaatgggtgatgtacggtgactaccagcgcgagtttggccagcaagcgctgcggaccctgttcagccagccggttcgcccgaccgccgtcttcgccgccagcgactatctggtgctcggcctgctcgacggtctgcgcgccagcgggctccaggcgccggaggcgctatcgttagtcggcttcgatgacgccaactatgccgattttacccagccgcggatttccactatccgccagcccgcccgggaactgggccgcaccgcggtgaacatcatgatgcgtctgctgaacgacgatcgggatatcccggcggaaacccgcctgccggtagagtggattggccgcgactcgatcaagatctgttaagcacgtcccaaaatggcgcaaaagcgcccacttttggcgcaaaaaacgatcaattaacattttattcactataatcagtaaaccggtttaccggagcgtaatgaataaactctatttattacataaggttaaatcacagggctgctgtgttgttcctgccctggcacggatgctgcaatgtttttactggcgaacaaatatcttacatagcgtttgtcctgactgtgctggcgagtgctctattccgcaggtaaaccggtttactagcatgtaaaccgtgtcggatagcatctctcccgcaggatggcgaacattttcccggcaacagcgatgggagttatcagatgcagcagccacaaactaccccgccaagggtggagatgatcaatatcaccaagacctacgggtcgatacgttcattgcgcggagtcaaccttgagctggctccgggcgaggtgctgggcttagtgggcgataacggcgcggggaaatcgaccctgaccaaagtgctctctggcgcggtgatcccctccagcggcacgattcgtatcgacggtgaacagcagcagtttactaatccggccgattcgcgccgctgccatatcgagatggtgtatcaggatctgtcgctctgcgacacggtcgacgtcgcgggcaatctgtttatgggccgcgagccgatgaaatcacgcctcggtatccccttcctcgatgaggcaagaatgcacgccgatgccagggagatgctaaaagggcttgggatctccattcccgatacccggctgctggtgcgaaatctctccggcggccagcgccaggccattgccatcgcccgcgcggcggcctttgacccgaaggtgctgattatggatgaacccaccgccgcgctggccgtcgcggaagtcgaagcggtgctggagcttattcgccgcgtttccgctcgcggggtgagcgtgattctgattacccaccgcctgcaggacctgttcctggtctgtgaccggatcatggtgatgtatgaaggtaccaacgtcgccgacagacgggtggccgacaccagcctgagcgatatcgttaacctgattgtgggcgaaaaattcaccgcccgctctgcggctgcacattgaggtaacaggatgagtatcatgaacttaagcagctcccgcatgatccagcattcgctgccgcgccgcctgctgcataaccactccggcgtggtcagcatcgcgctctttttcgtcttctgctgcgtggtgttttcgctgatcaccagcaactttctcaccggtaccaactggctcaacatcatccgtcagagcgccccgctgctgattgtcgcgacggcgatgaccctggtcattaccaccggcggtatcgatctgtcggtgggctccaccctcgcgctggtcggcgcgctttccgctatcgccctgaataactgggggctgccgtggccggtggtactgctcggcggcctgctgctcggcggattggtgggcgccattaacggcttctttatcgcctatgaaggcattccggcgtttatcgtcacgctcgccaccctggccgtggttcgcggcatcgcgctgctggtcacccagggctactcgattccggttccggctgacagcctgtttacttttataggacgcgcgtgggtagtcggtatccccatgcccgcgctgatcggcattatgattctggttatcgggcatattgttctcaatcatatgcgttttggccgctacgtgaccgctatcggcgctaacgccgaaggcgcgcgacgcagcggcattaataccaaagcggtcaccatgaaggtctatatcatcagcgggatggccgccgcgctggcggggatgatcattaccgcgcgcctcggcagcggctcctccaaccagggcgaaggctttgaactgcaggttattgctgccgttgtgcttggcagtaccagcctgtttggcggcttcggtaccattatcggtacgctgctgggcgcgctgtcgattgcggtcattcagaacgggctgatcctgtcgcatatttcgccgttttacacccagatagccaccggcaccattatcctgctggcgatctggctgaacacccgcattctcaaccccacgcgctccgcggcaaaaggatagctgatgaaaggatcaatttttcgccaccccaccccgctgccgcttggcgtcagcagcggttacgtgatgacggtgcttggcccgctgccgattagcgaaatgggggttactctgatgcatgagcatattctgctggatgcctccggcaaatgggtaccgccctgctgctgtagcgatcgccatcttgccgaaatgccggtgaaaatggaaaacctcggcgaactgtcgctgaatccgctgatgagccgcgataactgccagctgtttgacgtcgacgtcgcgattgaagagctgacgaaatatcgcgcccttggcggagaaacggtggtcgacccgaccaatatcggtatcggccgcgatcccaaagcgctggcgcgtatcgcccgtctgaccggtctgaacattattatgggcaccggcctctatctggaaccttcgcaccccgagtgggtacgaaccagcagcgtcgaacagctgaccgaacggctgatttacgatctgggcggcgcggaggagaaaccggaggtgctcgccgggctcatcggcgaaatcggtatctcgagccgctttacgccggatgaggagaaatcgctgcgcgctgcgggccgggccagcgccgcgaccggcgtgccgatcgaggtccatctgcccggctgggagcggctgggtcatcgggtgctggatattctcgaacaggaaggcgccgatttacgccataccgtcctgtgccatatgaatcccagctttgccgataagcgctaccagcgggagctggcgcagcgcggggcgtttctcgaatacgacatgatcggcatgagctattactacgccgacgagtcggcgcagtcgccctccgacgaggagaacgcccgcgcgattcgcgaactgattgacgacggctatatccagcaaatactgctgtcgcaggacgtcttcctgaaaaccatgctcacccgctacggcggccacggttacggctacatactcaagcattttgttccccgcctgcggcgccacggcgtcagcggcgaacagcttgaaaccttgatgattggaaatccccaacgggtttttggcggataaaaggaaagtcataatgcagaaaaaaatcttactggtcggtgaatcctggaccagcacctcaacgcacgttaaaggcttcgaccagtttgccaccgccacctggcacaccggcgcaacggattttctggccgcgttcgcggacagtgcctacgccattacctatatgcctgcccacgcggcggcgacagactttccgctgacgctggaagcgctgcagcagtgggatgcgattattctttcggatattggcgccaatacgctgctgctgcatccggacacctggctgaaaagccgccgaaccgccaaccgtctgacgctgctgcatgactacgtggccggcggcggctcgctgatgatgattggcggctattacagcttccaggggattaacggcggcgcgcgctatcgccataccgcggtggagaaagttctgccggtccgctgtctggcgtgggacgatcgcattgaaaccccggagggttgctatgccgaagtgacggaatcccacgccctgttcaacgatattccgggcgaatggccgtggctgctgggctataacgaagtagaaatgcatccggaaggcaaactgctggcgaccgtggccggtaccggtcatccgctgctggctattcgcgaatatcagcagggtcgctcgctggtgtggaccagcgatatgtcggcacactggctgccggaagagtttgctcaatggcccggctatcgccagctgtggattaactgccttgactggctgacggaacgtcgctgatggccgccccccttgagctcgcccggcagctgctgggctttaacaccatcaacccgccgggcagcgaagcagactgcatgcggttcttcgccgactggctcaacgatcgcggttttgcggtttcgctgtcgtcgttcggcgagggacgctgcaatcttatcgccaggctgcccggggcgaagaccggtaaaccgctggcctttaccggtcatctggataccgtgccgctgggaaatgccctgtggcagtacgatcctttcggctcgcagatagaagacgggcgtctttatggccgcgggtccagcgatatgaaagcggcgatagcggcgtttgccgtcgcctgcgttcatcagcgggaaacgatcctcgccggacgcggcgcggtattgctgattaccggcggagaagagaccggctgcgacggcgcacgggcgctgatcgcctccgcgacgttgccggacgtgggcgcgctgatcgtcggtgagcccaccgccaactatccggcgatcggccataaaggcgcgctctggctacgctgcgaaacgcggggaaaaaccgcccacggcgcgatgccggagctggggataaatgctatctatcttgcggcggatgcgctgggtaagattcagcatttttcccctggcgcggcgcacccgctgatgaagcagcccaccctcaacgtcggacgcatcgaaggcggactcaatattaattccgtgccggaccgcacgctttttgatgtcgatatccgcagcgcgcccaatttacagcacgccactatccggcagcgcttgaccacgctgcttggcgaaagcgtcacggtatccacgctggtcgacctgcccgccgtactgagccgggaggatcatgcgtggattaagcaggtttatcagcgctgccagccgctgcacgctaagccgattgaaccgcgcgtggtgccctactttaccgacgcctcgctgctgctgcctgcgttgggcgatccaccctgtattattctcggtcccggcgagccgtctatggcccatcagaccgacgagtactgcctgctcagccggctggaggaggctgagcagctatacggagacattatccgcgactggatggcgtagccgcccgcggcgaaggcaaagaatgagtgacagtgtcactttaaagcgcataccaggcgatcggcgtttgaataatatcgcggaataacagaggataaccgtctcgcgtcagaaacgcatcatcaccagcaaggaggcattaccatgtccgagaaaatccgcccggtgctcatttgcactctctctttacttctttccgcctgctcgggtagtgcttctgcgcctgatagcgccgaagacgcgaaagtatcggcagaagtggataagatgtttcgcgattatcaaacgggttcagatcaatcaccgcaggccaacgtctcacgctatctgacgcaggtccagagggctatcttcgcgaaaatagaccagccggcgtcctggcaggggcaaaaatgctcggtgcgcttaacgctacagcgtgacgggacggtgcataatccagcggtcgagagcggcgatccggcgttatgcgcggcggtaatgtccgcgctgaaagaagccaaaattccgcccgcgccagatgaaaaaacctatcagacattcagtcatgtggttctggacttcaggccctgagagctttttttgcatgttatcgcaggggctattcggcccctgcacgattttcagaactccacgcggccgccgaaattatagcgtcgcccttccagcatcgccttctgccggtaagcggtagtgtaaaccgggttcacatcaaacagattgtagataccgctcatcagcgtgacgtgcttactcaggcgataacgcacgcctagatctaccagcgcataggcatccgttgagctggacttgccgatatccggcgatctgctgcgccagctcgccttggtccacagttcaagatcggaagcggtgttccacgtcagcgaaacgttggccatactgctggggaaatcgcttagcgcataacccttatactcaccgcttttttgttcactgtgggtataggtatagttggcgttcgctttcagcgctgcggtcacctgccagtcgccgttcagctccagtccgtagatctccgcatccccgacgttaatgtattgcgacacgctatccgcggtatagccgttgtattggcattgccgggtagccgaggcggtacagatggtatggtcgctgattttgtctttaaatttggtatgaaaaagcgtggcgtcgagcgccagcgcatcctgctgccagtacacgcccagctcggtgttgatgctctgctccggtttgagatcgtcgttgccgataccaatctcagaatagggataagcgccgtagacgctggtaaagccggcgttgttctggcgcaggtccggttttttatagccggcggatacgccacctttcagcgcccagctttcgtcaatggtccagttgccgtagagcttaggcgtaacgtgatagccaaaatagctgtcatgatccaggcgcgcagaagtggtcaacgtgaagtccggtacaatcatccacgcgtcttcagcaaaaaccgcccagccgtgacgggtgattttactcaccggggtgaccccgggcgcctgcttgtccgcaataccaaaggtgtcattcagctcattgcgcgtgaagtttacgcctagcgtcagcttgtgatcggccagcgtaaaggtgtttgcgctattggcctcaaaattattctgcttgataaactgcgagtccatgccgggcacgcggtactccgtacgggccttttcgtagctgataaagttcttcacctccaccaggtcatcaccgtaccaggcatgctgtgacagcgagaccgcatcgcggtcaaagccccagtaccacgctttatcgttatgggttttctcctgattgcctttggaggcgttcagatcccagagctgggtatcggttggcgaaagagaaattgtggcgtccagattccccgcctgatgcttaacaaaacgttcctgggtcgggctgtcatcatcgcgacggtcaagatagtcagcccccacgctgacgccgagtttgcccggtacgacgggccccataaagaaggcgtttgtctggttagtattgccgtattcgcttttctcctgcaggaagtaattatcctccagcacccccgtccatttttcgaggttatacgcctttttggtgatgacgttgaccacaccgccgatagagtcagagccgtacagcgatgacataggcccgcgaatcacctccacccgctcaatggcggccagcggcggcataaaagcggcttcagacccaatgtgatgcccataaggtcgcgattcgcgggtagactgcttgataccgttcaccataaacgaggtataggtcgaatccataccgcgcatctgtacatcgccggtcgccaggctgccgtggccgttgcccaccagcacgcccggcatctcgcgcaacgcttccgtgacgttctgattggaacgggtattcagcgccttctcatcgagcaccgagatcgtcgccggcgcctcgcgcctctcctggctgaatcccgtggcggtcactaccatctgttcttcatttatccctgcgccatcagcggcgtaggctgccgcgggcagattgacgaaggcgagcgccatcgccacgtctatgcgtgtcttcatcgccacaaaaagtccttagaattgagtgagatcgatcttgagaacgtagtcaggccgatcgcttttttcgtcctgtttgacgctggcgtacagcgttccgccatccgcagaaaggaccaggctgttgggcatcgccgccgttttgagggtgtgcttgagacgatgggttcgcgcatcgatgacgctaatcgagcgatcgttgcgatgggtcacgtagatttcttcacgcttggcgttatagagcacagcgaccgagtttggcgaagcgatacgatcgaccagcttgccggagtccagccgcaccaccagcacatcgcgggtgttggtatcggcgatatatccgactccggcggcgctgttcagggcgatattgaggaaatagtgctcagcgtcagccggatcgaccttcacgcgggaaattaacgtcgacgttttgccgtccagggtagccaactccccgttgccggtgaccgcatagactttttcgcccgatgcatcaacggcaaaccctacggggtcgatgttcttcagcgtgtcaatcagctgctgcttgcgggtatcgaccacccagagcaggccctggcctttgcgcccgatccctgacacatacaaacgctggtttagtttatccagcaccacttcgcggacgtgggcctgtttcgcaggatctgaatcatcgctgagctgaatagtgttaatcaccttattggtcagcgtatccagaagcgttagcgagccatccagcgcgttacccaaatacaggatgtgattttcttcatccagggagagcgcgaaggcgcggcgttcggtaacgattttctcatcaatccgcagagaatccgccgccagtcgaaagaccagtcccgcggttttatctttatcaaacgagggcgcggaggcggcgtagagcgtcttctggccgttatcataggccagctcgtaaacgccgtggccgagagcctgagcgtggaattcccgctcggtgaaatccttagccgaggcggagggagcatgcagggaaaacgaaatgaccagcgcgaggcgcgcggcctgcttcagggatgcggtagacatgtaatttttctttacagtagcttacggaatgcaaacactaatgaaaataaatatcatttgcaattgcattcatctccatcttccctaccaatttttgtgttctgatattaaccgccgttttttgttcccgccgggagctctccacgcttcattcatcggaatcattaaaatcacgcgataatcggctgtaagatgctgactaactccgccagactccccgcctgcatcttttccatcaccctcgcccgatggacctccaccgtgcgtacggcaatgttcattatctccgcaatctcccgattcatcagccctttcaccaccagcagcgcaagctcccgctctttgggcgttagctgctgatagcagtccacgttcttttgccgcgcaaaccgctcgcctgaggccgccaggccgtgttccagcgccgtttgtagcggcttcaccgacaccggcttttgcagaaaatccaccgcgccgcgtttcatctgttctaccgccatcggtacgtcgccatgtccggtcagaaaaaccaccgccagggtgctgccgcgctgacgcagcgcctcatgtactgcctgaccgtccagcgccggcatccgcatatccagcaggacaacgccggtccggaagagatcggcctgcgcgaggaagacgcccccctctgcccagcacatcacctcgtagcccaggctttccagtaaaaaagcacatgcctgggtcaccgccaggtcgtcatccagtagatgaattatcgccattgccgctccgcgctccttgttgcatgaatgtcagtaccacggtgacaccgggtcgtccatcgggcgccgtttgatttgccaggcttatttccccctggacatagcggaccagccgctgacagataaccagcccaagccccatcccctcttgtcgactggtcacaaacggctggaatgcctgagcaagctgcgccccggcgataccaccgccgttatcctgcaggacgatcttcacgcctccggcatcgcgaacggcgtcaatccacagcatcttcgccccggcctgcgccgcattgaggatcagattcgccagcacctgttcaagcagaaccggcggtaagacgagcgttaacgggcgatcgacatcgctgttgagcaatagcccgggaaactgctgcggcattcgcagccactgccagacatggtcaatagcctgacgaacgctgatatgttcccaggtctccgctcgtcctggctccccgtgcgcctggctgacccaatggcgcagattgcgcagcgtttccgccccgcgctgagcctgttgatcgatgtggcccagcgcgggcagtaagggatgctgcggatcctgtttctgcaaacggatcgtacaaccctgcgcatagtggcggatggccgacagcggctgatttaactcgtgggcaaagcctgaggtcatctcacccaatacgctcatctgtcttgccgtttgcagcgccagctcctgctcgcgcagccggatagcgttgcgttcaagctgcctgccgcgccgccgcaccagcagcatcacccagatataattcagcgtcagcaacagcagcgccagcccgatgccgcccatgattaaccggtgctggataagccagcttttcatctccagccacagccgtcgctgctgagggtgctgttgaacttcgctcagcaacgcttccacctgacgggtcgaagcgggcgcgccccagtgaaagacggcgttatccggggcattgagcaagacgcgggtcacgcgatccgccagcgcgtcgctcaccgccggcagcgcggcaaacgaccagtcgggatacagcggggtactggttagacaaggtatcgccgccggccgctcgatgaccgcggtaaaatcggctttatttaccagtccctcatcagccattttttccagcaggcacaccggaacaatcgccgcctgcactgcccgttcacgcagcagatagatcaacgcatccgcggggaatccgctaaaacgcagatgcagatcgcgttccggccgcagcccggcatcgctcagcgccttgtatcccaataaatagccgccgaaggcctgaggatcgatggcccctaccgttttgccgatcaggtcggccggcgacgaaataccgctgtcgcgacgagtcaaaatgacgctgccgataacgttgcttgtcccgagtgaagagcgcaaagaggccagccagcgcagcgaagaatgactattcagctggacaaactgcgccggattggtcaccacaaactgcaccgagccgttattgaccgcctcctgcatctgctgcagatcgaggggctgaatgtgaaactgctgatccgttagctgctgattgagcatcacctccagcggctgccagtggctgcgggttaagacctcgccgcgcatggccagaacgccgatattccacgacgccgcccacccgctgctgttcagcaggagcgccgtcaccagcagcgccagacgctgcacctttttcgctctcacccgattatccctgttcattatgttgttttagatcaacaacccgccgggtatgtggttaaccacaatagagctgaccccgccgcgatttttacactgtaaatcatcaacattgtttattcatcacatgcaaaacaatggcgtgacaaatgtttcgttattgctgcgcgagggaaaaatatggacagcagtaaacgacagtttctggcgcagctgggcgttctcaccgccggcgcgtctctggtgccgctggcggaggcgaaatttcccttttcgccggcccgccgcgaaggcgcctcccgccaccgctatgccatgctggttgacctgcgacgctgcatcggctgccaggcctgcaccgtcagttgcgcaatcgaaaatcagacgccgcagggggcgtttcgtactcacgtcaatcagtatcaggtgcagttgggcgatcgggtcaccaacgtcctgctaccgcggctgtgcaaccattgtgataacccgccctgcgtgccggtctgcccggtgcaggccacctttcagcgccaggatggcattgtggtggtggataacacccgctgcgtcggctgcgcctactgcgtccaggcctgcccctatgacgcgcgttttatcaaccatgagacacagaccgccgataagtgcaccttctgcgttcatcgcctggaagccgggctgctccccgcctgcgtcgagtcctgcgtcggcggcgcgcggatcgtcggcgatatccaggaccgtcaaagccgtatctcgcagacgctcgccctgcaccatgacgccatcaaggtgctgaagccggaaaacggtaccgtcccccacgttttctatctcggactggacgaggcgtttgttaccccgctgacgggacatgcccaacccgcgctctggcaggaggtttgaatgagccaaaccatgatcattgaggaggtgctggcccgtccgcaggaggtgagctggctaccgtgggcggtgcagtatttctttttcatcggcattgccgcctgcgcggcgctgtttggctgcctgcttcactggcgcaaaagacacgatgcgaagctggaacggctgacgctgctgattgctctgacctgcgcaattaccgcgccgctggcgctgacggcggacctgcatcaagccgcccgcttctggcacttttacgcctatcccacgccctggtcgtggatgccctggggggcgctgtttctgccgctatttaccctctttctgggcctgtggtttgcggtacggcagtcaggtctgctgcgtaacaaaagtgacagcgtcacaaaatggctggcgctggccagcgcgcttaccgcgacggggctgctgctttacaccggacgcgaagtctccgtggttcaggcccgcccggtctggttcagctacgcctttgtgctggcgatgttctttagcgcgctgcaaacctttttcgccctgctgattgtcgcggtacgcaatgattttcaatgccaaaggcagttggcgatatggcagctctcagcgcttatgctgctggccgtcgtcgtggcgatctgggtcagcggtgataccctttccggctcggctattcgtcagtggctggtcatttcgccttcagcccgtcattacgcgatcggctggctggcatgctggcttatttcattgatcttttgcgcgcttgccctgcgttatccgctgacgctgcccgttcgcgccctgctggccgtcagcgccatggcgctgagctggctgatgcgctggacgctgctgattcaggggcaaaccatccccaaatttaatgcccagtttaatccctataccctgccggtcggtaccgacggctggctcgctatccttggcaccttcggcctgtggattgcgctgctcattattgtccgtgaaaccgtaaacggactcgcaaggagaaggcaacatggctaatttaacccgtcgtcagtggctcaaagtcggcctcgccgcaggcggtctggcgtctttcgccctgagctatcgcgaggtggcaaagcgcgccattgatggcctgctcagcggtacatccggtaaagtgacccgcgatcgtattttcgctaatgcgctgatcccggaagccaatgcaaataccggctggcaacaaaatcctcggcaggttatctcgatgacccaatgttttggctgctggacgcagtgcggcgttcgggtgcgggtggatagcgagaaagaccgggtactgcgcattgccggcaacccttatcacccgctttctcatgagcaccacctcgactcttccattcctttttcaaccgccatggcgcagctggcgggtgaaagcggacttgatgcccgctctaccgcctgcgcgcgcggcgccacgctgctcgagggactctatagcccgctgcggctccttgagccgatgaagcgcgcgggtaaacgcggcgaagggaaatggcagcgcatcagctttgaacaactggtgaaagaggtggttgaaggcggcgatctgtttggcgaggggcacgttgatggcctgcgcgccatttatgcgccgacaacgcccatcgatccaaagcatccgggattcggcccaaaaaccaaccagctactggtcaccaacaccagcgacgacgggcgtgatacctttttacgccgttttgcgctgaacagcttcggcagtaaaaacttcggcgcacatggttcctactgcgggctggcctatcgcgcgggctccggcgccttaatgggcgatctggataaaaatccgcacgtgaagcccgactgggataacgtcgagttcgccctgtttatgggaacgtcgcccgcccagtcaggcaacccctttaaacgccaggccaggcagctcgccagcgcccgcctgcgcaatgactttcagtatgtggtggtcgcgccggcgctgccgctcaccacggtgatggcagacgatcgcgggcactggctgccggtgatccccgggagcgattcggcgctggcaatggcgatgattcgctggattatcgaaaaccggcgctacaacgccgattacctggcgctaccgggcgcgcaggcaatgcggcaggccgccgaaaagagctggaccaatgcgacccacctggtcatcaccgatgaccagccggagctggccggacagcatttaacccttgctcacctgaatgcggagggcgccagcgaaccggtggtggttaacgaaagcggtgacgttgtcgccgccagcggctgcccgcgcggcgcgctctttgtaacacgccagctaaccctgccggacgggctcagcgtaacggtcaaaagcggcttccagctgctgaaagagtccgctgaaaagctcaccctggcacagtacagccagcagtgcggcgtcgcggaagataagatcgcggcgctggcggatgcctttacccgtcatggccgtaaagccgcggtcattactcacggcggcatgatggccggcaacggattttacagcgcctgggcggtcatgctgcttaatgcgctaatcggtaatctcagcctggaaggcggcgtgtttgtcggcggcggcaaattcaacggcgcgacagacggcccgcgttacaacctggagagctttgccggtaaagtgaagccgaaagggctcagcatcgcgcgcagcaaaaccgcgtatgaatcctccgaagagtatcgcagcaaggcggcggcgggcgtctccccctacccggccagagccccgtggtatccgttcgtcgccggacagctgaccgagctgctgacctcggcgctcgaaggctatccctatccgctgaaagcgtggatttccaatatgaccaacccgctgtacggcgtgcccgggctacgcgcggttgcggaagagaaactaaaggatccgcagcggctgccgctgtttatcgccattgacgcctttatgaatgaaaccaccgccctggccgactatatcgttccggatacgcataatttcgaaagctggggattcagcgcgccgtgggccggcgtcgccagtaaggccaccaccgcccgctggccgatcgtccctgccgccaccgcaaaaaccgctgacggtgagccagcgtcaatggaagcattttgcattgcggtggcgaagcgtcttaatctgccaggatttggcgaaaacgctattaccgatgctcagggtaaccactatccactccaccgggctgaggactattacctgcgcatggccgcgaacattgcgtttatgggtaacgcgccggttgccgaagccattagcgaggatctgacgctgaccggggtgcagcgtattctgccggttatcaaccagaccctgaaagcggacgaagtgagccgggtagcctttgtctactcccgcggcgggcgcttcgcgccggacacaagcggtcgagcggagaatcgcgtcggtcaattgtgggaaaaaccgctgcagatctggaacgcggaggttgccgcccaccgccacgccatcaccggcgagcgctacagcggctgcccggcatggtatccggccagattgtccgacggacgcgctatcgaagcgcttttcccgcgacagcagtggccgctgaagctgatctcgtttaaatccaataccatggccagcgcctcgacggtgatcccgcgcctgcatcatcttaagccgaccaatctggtggcgctgaatccgctggacggccagcgctacggcctggcgcacggcgaccgcgtacgaatttccacgcccggcggcgaggttgaagccgtcattagcctgttaagtggcgtaatgcccggcgtcatcgcgattgaacacggctacgggcatcgcgaaatgggcgcggcgcggcacaccctcgacggtgagcccatgccgttcgcggcgcagattaaagccggcattaaccttaacgatttgggatttgccgacccaacccgcgaggtcagcaatacctggctggactgggtctccggcgcggcggtgcgtcaggggctgccggcaaggattgagcgggtgtagaccgcttcgatacgtgcagggttgtgctccttagcgtaccggtattgaggcggccatgattagttataaaccaccatcatcatgccggttccgttgaaggcgccggttgaggttggcgtcccagattgccacgcatgccgttgctgagcgggatacaggtattgcctgtcaataggtaccctactcgctgccgtagtgaaccgtcagggtgatatcgcaggccagagaaaatcgcatacccctacagcaagaagtgttattttgcctgttccttgttattctgctgaattgttgtccaggtgattatcattcagcgtggtgatttttcagacgctgccctggcgcttgccgactcacactccagaccaaaaacgcggagagcggcaaccccattcacacctgccctgcaggtgttttttccacagggagattaagcgtgagatttgcatcagtacctttcaatcagaaccaggtgggctggccgctcaatgagattgatcgacaaatacagccgcagctatgcggcgacattaaagccgactgggtgattatcggctccggctatgccggcgtaagctttgcccgcaggctggccagcctcaatccgcagctgaacatcgtgctcatcgatgccgaatgcgccgcgaccagctcctcggcgcgaaattccggctttatcatcggcctgccgcacaatatcggcagctctaccgccgagctgaaaaaagcgcaggattaccgcgccctgctccaggaggggatccgcctgctcgatgaaacggtgaccgagcaccagattgcctgcgaatgggaaaacgtcgggaaataccactgccagatagatccgtccagcgaagccattatgcaggagtatgtggataacctgcagctgatgcaggagccttacagcctgctggacggcgaagcgctgtaccagaaactgggaacccgcctctacagcaaaggaatttacacccccggctgtattctggtgaacccggcgaaactgattgcgggcctcgcgcgtcatctgccggaaaacgtcacggtttaccatcaaaccccggcgctggctatgcgtcaggaaaacggcggcgtcagggtgacgacgctgcagggcacgatccgcgccgaccaggcgatgctggcgaccaacgcgctctcccgcgaactctcgcccaccgtgagccgccaggcgtcaatggcgacctacgccagcattaccgccccgctcacgcctgaacagcgccagcgtctgccggcaatggaaagctggggattaacgccggtcaacgcgatcgccggcgccacgctacgctatacccacgatcatcgttttctggtccgccagcatgtcgatccggcattgcggggagtgattaccgccggacagaccgccagcgccgcgcgccagcatctggcgctgttccatacggcctatccgcagctgcaggatgtgccgctggagcgaacctggtccgggaccatcagcgtcacccgcaacggcgcgccggtctgggggcgtcttgcgccgcagatctggaccgccgggggctgtaacggcgccggcgtatccaaacagactatcgccgggacgctgcttgccgatctggcgatgggccaggacaacccgctgatcgccgcgatgcagtcgctcggccaggcgaacgttatgccgccttcgccattcctcgatatcggggtggcgggcgcattatggaaagagcgttatgtggggcgcaaagagatgcccgcgtaatcgctgtctgacaggtttcactgcccgggcgtgaaacctgttgtttgggctactccgggatcgcttcatctttacgcagggtcaggacctcgaatccatccgcggtgacggcgacggtatgctcccactgcgcggacagttttttatcgcgggtgaccaccgtccagccatcttttttggttttaatccggctatcgccctggttcaccatcggttcaatggtaaacaccatcccctccttgagcacggcgccggtgccgggtatgccgtaatgcagcacctggggatcttcgtgcatctctctgccgacgccgtggccgcagtactccctgaccacgctgtagccgttaccttcgacataagtctggatcgcatggccgatatcgcccagcgtcgcgcccggcctgacgaccttgatccctttccacatcgcttcgtaggttttctgcaccagccgacgggccagcggtgaaacctcgccaatcagatacattttgctggaatcggcaatcagcccctctttttccagcgtaatatccacattcacaatcatgccggatttcagatgctcgctctcctttggcataccgtgacaaaccacttcgttgatcgacgtattcagcacgtaggggaaatcatactgccctttgctggccgggcgcgaatgcagatcgttgacgataaaatcctccacccggttgttgatggccatggtggagataccgggctgaataaaggtatccagcatgtcgaaaaccgaggccaacagctcacctgcgcggcgctgtctggccagctcgtccgcggtcttaatgggaattgatagcattgatcacctccagcaaccggtcagagccggacttgagcatcatcagcttaatttgctgatggttaagttcgggatagagctcgctcatcatacccagacggatccagtactccgcctgcgcgttgaccgaacgcgacatcgccttgctggcgtcacgaatatcgtcgtgcagcaggtcggaaatttttacaatgcccatttatacgtaccgtaacaatttatatatgtttcgtatattacgcctccccgctcaagcagacaacgtttgtcgtcagaaagcagaaaatggggttgcggtttttgtcgcccgcgctacggctggttaaggttcagagccactatctggatgttacgaggttcaacgacggtgcctttcgtcgtcacaaatgcattgtggacgacgtccccgctctctttatccaccagcgcaatatgcggttcatcatgcaggatatttttatgcccccacgccatcagggaaaacaggatcggcgccaggctgcggctttttggcgtaaggatatactcataacgttcgcgcacgccttcttcctgataaggcgttttgctcagtaaacccagttccgtcattttctttaaccggtttgccagcgtctgcttaggcatttttgtatgcgagcggatcgtttcaaagcgcgtcacgccgtagaaagcctctcttaaaatcaacaaaacccaccgatctcccaggatttccgctgccgcagaaagcccgcaaagctccggtaataggtaggcaactgaattattttttgacatgtccgctttcgctctttaatctgagtatgaattttagacctagcttaccaaggagaatacaatgcccttcgtcaatgtacaaaccattaaaggaataatgaacccggagcaaaaaaaagagcttttacgccgcatgaccgatctgattgtcgaaattgaagggaaaggcgatcccgagttccgccgttcagtctgggttcgcattgatgagcatgagccggaacagtggagtctgggcggcatacagcccacggctgaagcgatcgcggcaaaattttcgtctgctcaataatcctgcaaggtcaggagcctggcaccgtcgctggcggccgaacgttcacgtttacccataagcttcccgtccgctccaggccagagcggacgggaggcgtgaaggttaatcgactctgcataccacggtggcatgatcccaccatgcgttctcattaatattcacctcaagaaccgtaaattgctccgcccgaatctcgtccagcagggcctggagcggtcgcaacgtacgccatggtttgccctctttaagtaaatgatggcggataggatcgtacgcgagaatatcctcgggatgacgcggggttccgcacatggagccgatcaccagccgtcctccgggtttcagtaatcttctgacttcggcaaagcagaggtggcgggcatcatcaatcaggcaatgcacacagctgccatcaacaatgagctcaaacgtcgcatcctgacactgatgaatatggcagacatctccgacgaaaaaatttgccgggagacccgcttgctgaaaacgattttgtgcccatcggatcgcggtttcggaccaatctatcccccacaccgaatagcctcgttccgcaaaatactgcgcggccatcgcgccattcccgcaccccagctcaaggacaggcgcgccgggttgggggaaatagtgctgtaaatgaagccagctaaaaacgcgctcctgttgttctttggcccggaaataaccttcgccagcccaggcgatagcgccatttgccagcaactgccgatactctttttcatagcggttcataatcaagacgcctttgtcagcagcaacgctcgtcactttacgcgcggtagaggcaggagaaaaaccaaccgtcagacacgctccgtcatctcaggcagcaattgttcaatcacgtcgataatacttcttacccgcggtgggataaagcgggcgtcagggtagaccgcatagagaaagcgatcgggtaatcgccaggcgggtaataccggtaccagcctgccggactgcaaagcgtgggccgcaaggggtaactgcatgccgccgataccgatgccggactctagcgcctgcagcagcgcttcgctggtgttggcacggaagacggtattcactttcatatcaaccgttttatcacccgagaccagccgcagcggcgcgtcctgcgcgatgccgctgaaccgcacgtgcgggtgggcggccagctcgctgacggcatgcaccgttttaaaaccgggggcggcaaagagcgcggtttcaatacgcgccagcacgcgcgccgcactccccggctgcggttcactgctcaaccgcagcgcgacatccactctttcagcaaccagatcggcaatgcggtcatcaagggaaagggtcagacgcagctcggggtgcattttctgcagcgccagcagatgcggcaaaaagagctgcccgaggccgctcggcagctgcacgtgcacccggccttgccactggcgatcggttggctgtaagcgcctttccgcttcatgcatcgcttccagcaaaagctgcatatcgcgccggtaactttccccctgctcggtcagcgccatcgcacgcgtggttcggtgcagcaacaccaccccaagctcctcctcaagcgccgcgatctgctgactgacggcggattgtttcatcccgcactggcgggctgccgcggaaaaggatcccgcttctaccacgcgcaggaaggtggcaatggcgttgagcttattattcatttaatgattctgcttataagtgccatcagttttacgggatatgcgtgaaaaaaataatataccacactgcctctgtcacccaccctggagaagcaacgtgaataagataccgcaacccaaagtcgccctggtcgccggcgccagcggcattattggcagagagctggtgaaaacgctgttacgcaatcgctgggaggttatcggcctcagccgccatgcatcgtcccacccggaaaacattcccttcattcacgtcgatttactggatgcgcagcacagcgcgcaaaaactgcattcgctcaacggcgtcacccacattttttacagcgcatgggccaacgccgggaactgggcggaaatggttgaaccgaacgtcaccatgctgcgcaacctggtcagcaacatcgagcaaaccgcaccgctacggacggtaagcctgatgcagggatacaaagtgtacggcgcgcatcttggtccgttcaaaaccccggcgcgtgaaagcgatcccggcgtacccggggccgaatttaacgccgctcagctcacctggctcagccatttccagcgcggaaaaacgtggcgctggaacgcgatcaggccgggcgtggtcggcagcacggtgcccggcaacgccatgaatctcgcactcagcatcgcgatctatgcttcgctatgtaaagcgcaggatctaccgctgcgtttccccggttcggaaaaaacctggcacagcatcgtcgatcacactgacgccgggttgctggctgatgccacgctgtgggccgcaacctcgccaacggcgcaaaaccaggcgttcaacgtcaataacggcgacatctggcgctggtgcgagctgtggccgcgcatcgcgagctggtttgaactggcatccgccccgccggtcggactgtcatttcaccagctgtttgtggattaccgcgcgtactggcgcgaactggccgggcagagtctggtggaagcggacatcttaaggctcagcgacggtaaatttgctgatttcgtctttggctggaactacgacatgtttggcgatggcagcaaactgcgccgggcgggctacactgaaatgcaggccaccgacgacatgtttttccgcctgttcgcacagctgagagccgctcgcattatcccctgaaacagcatgctttaaccgtcagccggcgtcgcgcgagcaatccacgattcagtttttcgcctcttcctcgcgcgctctggtatccggggtaatgattattccaggacgtaaaaaagccgggttctcccggcatcatgatttaccaaccattttctgcgtataaataccaaacgtagtggatgatactactccaaatttcagcatccttatgcttctgatgatttcagagtacagaaaggtatccgcttcgatacgctggcaaaaatctgccaggcgctggagtgccagccaggcgatattctcgcctgggaggcggattaacgccctttctcgatcgtgcaggcccactgctggctcatgctgctctggctggtggcgatttgcagcgacaggctggcgtcaagggtatgcgtgacgctgtattcaagcaccacatcatccagatcgcgggcgacgcgctcaatgcgaaacagagcctggccgggttcaatattgagcaatcccgccgtgcggctatcgcagcacaccggcgtatagcgttccgtggcgttggccggcgagtagccgaacgtttcccgcagctgcttatacagcgatcggctgccgtccacgtggctcagatcgttatagatacggccattaagccaggtcagcacatggccaaccggccggtcgccctgcactaacagccgctccagacgcatcagctggcagcctaaatccagccccatttgctccgccacctggcggtcggccatggtcgaaatcagcgacagaacttccacggctatctcccccggcggagcaaaggtggtcagtacgtccgggaggtcggtgtagtatttctgcagcgcatcgcggttaataaacgtccctttaccctgttcgcggtacaccatgccaatactggccagcgaatctatcgcctgtttgatggtaccgcgcgcgaccttaaactccccggcgagcagcagttcgcccgggagtttatcgtcataggtaaaagagaggatccgctgcaggataacgtcttttatccttaaatagagagggagtccatccgactcaaacatacttgtgctccaactcagaggtagtgtatctggctcctgtaagcgctaagtatatcctgatttatctcctgattaccgtctatgtttgcgctggcgagaatgggcggcgtgcgcgcattttccagcatgatttcgcaaatacgtaataccaggctgttggcgatggtcgcgcccatgatggtggagagcggcgcggctttctgcgccatccccggcaggctcaccgccgcatcgccatactcgcagtggttatcaatggtgatatcggccacatccaccagcaacttgccgctggagtggcgcgacgtcacgcgcgccgccgtcgccaggctggtaatcgcgataaccgttgcgccgcacgctttcgccgccagcgcgacatcaatggtaatcgcgttgcgtcccgacaccgaatggatcagcagcgtatcttcagcccttagcggcgactgctccaccagtacccgaccgaagtgctccacattttccaccgcgctggtgagggttaacggcctgacgttaagcatcagcgcaggcgtaaaaagcggattgacgatggccaggccgcccgcgcgatagctcatctcctccgccagaatcccggcgtggctggcgccaaagacgaagatgttgcgctgccccataatgctgtgggacatgatttccgccgcccgggtgagttcatcggggcgctgctcaagaaaagccagcttctggcggatctgactgtagtactgtttcagggcctgactcatagacttcctcccgatatcagaacgccagcaggcgggtcaaaagatgaatgactggcgcgaggacaaacatatcgctgtcgcctgcccatagcgcggtatctgggatcgtattgtcgataaaaccggtgacgcagaaatactgcccccaggcgaccacggtcgaggtgataaaccccgccagcagagcgcctttatagcctccggtaatattgccgaagacccccgccgtaccggcgtgaaagaaaatcacaatcatgctgggaataaaaacgtagccggtatagcggccgatcagggtcagccacagcagcgagccgacaaaagcgccgacaaaccccagcaccaccgcgtttggcgcaaagttaaacagtatcgggcagtccagcgccggttttgcgccgggcaccagccgcgagccgatgccgttaaacgccggcaccatttcgccaataaacatccgtacgccgagcagcacgacggcaatgccgccggtaaacatcagcgattgtttgagggcatagatgtagaagctcaggtcgccggattgcgccaggatctccgccgctttcggcgtacctttaatctgcagaataaaggtgccaataaagaacagcagcgccatggtcaacgccgtcaccacgttggagtcgcgcaggaaacccagctttttagggactttgatatcttcggagctgattttgttgcgggcgaaaatctggccaaaaatcgcccccagcagcgcgacggaggcggaagtatgccccagcgccacgttgtcgttgccggtgattttccgcacccagggctgaaccagcgcgggctgtagggtccagtagagccccataatcaccgttagcatcagcgtcagctgcaccgctgaaatagcgggctcggtgttcaccatcaccccggcaaagatcatcgtcgtccagaacatcatatgtcctgtcaggtagatgtatttaaagcgcgtcagccgggccagcagcaaattgatggcgaatccgccggcaatggcgatggtcacgctgcttccgtagcgttcgctgaagcgcgcctggccgataatattggtcaggttcatggagctgagaccgaaaacttcggtccagatcggctgaaatatcagcagcgcggagacgataatcccggcccccgcgccgatgatcagaaagcccagaatgcctttcagggtgccggacacaatgtccgccagcgatttcttttgcagcactagccccagcagcacaatcaggccaattaagatcgacgcttcaccaaatatattgatggtgatccagcgcagcacgccaagaaactcgctcatgacggctctcctgcgggcagaattttcgcctgggtcagcgccgcggtgatttcggcgttatcgatatagttgttcaccaccaccaccggacaggacagatgcttaaggttgtccaccagctccgcgttggttatcaccacatcggcgttggccgaagcggcggaagagacatccatatgttccaccgaggcctgaatcccgtgctgttttaacaccgcctcaacgttcatttttaaaatcaggctggagcccatacctaaaccacagactgtcagaattttcatcgctattcactccgtgttcatcacgctacaaacgctgcgagccgctggctaacagccgataaagttgttctggatcgttcgaatgcatcagggtatgcaggttattttcatcgctgagtacggtcacgatatgctggataaggtggatatgggcatcgctgctggttgccgaaagccccagcaccacctgcaccgggtcgttttccgcatgaccaaacgccagcggttcacgcagcctgaccgcgctgatctgcgctttcatcgccccctgctccgggcgggcatgcggcagcgccagcccgggggcaatgacaaaataggggcccagctcgcggtagctatcgaccattgcctggacgtattgcgggctacaggctcccgcgcggcacagcgcgttccccgcctcgcgaatggcctcctcaggtgtagcggccgggcagtcaacgcgtatcgcctgacgctcaatcatcggaggctccttgggttaagtgatgacggatagaggcaagcgtggtcgccagcgcccgctggacgaacgcgcgccctttctcttcgctggcggcagttggatcgcccagcaccgcatagtcagaaaactcggtccagggtatcggctgatagcgaaaattgttcgggaaagtcggatagtgcgcgcgggcgttggtcatggtgacgaactccggcgccagcgccagcatcagcgaggtttcgacctcatcagcatgcatatagccggggtaagccaccgcggtggtttgccgtcgttttacctcctcctccatccccgcccagctatagctaagcaaggtaataccctgctcttttagctgccgggaggccgctttcatcgcatcaaaattgccgtaatgcgcgttaatcaccgccgtggtggtgataccgtagctggccatgttttccgccagcgacaccagcagcgacgtcagccgttcatgaccgatatcaatcgcgcccgcgtggccgcgcagggaccagacctggctgtaggaaacgaccggcaggctcagggcgcactcgcccagctgctcgtcaagcagcgcgcaaaaccgctcggccagcaggttatcggtatccagcggcaggtggtcgccgtgcggctcgacggcgccgagcggcaataaggcgatccgcgccttttgtaaagcccgccgggcctcgctttcgtttaaacgatgcagcttcataacatctcctcaggcaaaagcgaggtaacgcgccgggttgtcgacgaagaaatcatgcagcagcgcttcgccgtcaaacccggcttcccgggcctcgtcaatgaatcttggccgccagtcgctaaggataaatttcagccccagcccccctttgccgtaatgcgcgctcatggatttacgggcaaaatcgccgccgattaagatctgcttttgataaccgcgctggcagagcgccaggatggcctgggtacggatgtgctctgggtgatattttatgcggctgataccgtcgaaagagagaaacgccccggtgttggcgatctgacggtgcagccagggatcggggttacgatccatatgagcaaaacataagcgggagagatccagcccccattttttaaagagctgcgcctgctcgagtcccatcgtccccatttccgtatggctgtgcatcggcgccccggtgcgctgctgggcgcgaacgataacctccatggttttttgttccagaggggaaatggcgttatagccggtaccgcacttcaccacgccggcccgatgttcggtgccctctatcccctcagtgacctcgcgacagacatgttcaaccagttcatcaacctctgaatgtgcaatccattcggcgaaagtttgcgcggagcccggccgcttgctgctccacagaaagcctttgttaaaacccgcagtggcgataatgtgcagctgctggcgctgcgccatggcggcgacggctgcggcctgacggccataatccggcgcggtggcgtcgtagatggcgttaccacccgcccggcggaagtcgcttaattcacgctctgaagcctgcggatcgtcgagtaacagatcgtcatcctgacgctcggcccaatagggcggaatacagtagatatggtcgtggctgtaggtgacgcccagctgattagcggaaatatccccgtttaacgttcgaatgatgcccatgtttcttgctccccggaacggataagaaggtgctttcaacataggcgcgccccacttgaccagtcaagtgatcaagttcgcatccgtcatataaaatttctatctgtgagctcggtagatatttaaaacgcgataagagcgcactacgcgactgacttccaggaaacagaaattatatctgtaagaggatcgtgacggggacggtataaagcttttcatacttcagtgaaaattacggctgacgctggctgctataaagggaatggtaaaaatacctttcatgctcccgaacgttcccgtaataaaacactacctaaaggttatgccagtgacttcacggacaaacaggatgggactgaattattttccctttaaccatcggaagctttcgctggataaaattcaaaaacgggatttaatgaacacgatcaaggagcagtgatgttctacaggaatgaagtgatcagttatttacagacgaataaaattcttgcgttaaaactcgaccgtgccttaacgggcgtcgaaaaagcggtatcaaatcagattgaaagcataggcgcaggcgcgatgcgtatgctgtattatacctcctgctttactgatgagtatcaggatgtatgccagcaacaaaaaaacgaagaccttcgatttaaacaaggtgttatttatttgttgcgacatggtaatctcgtgtacgacttgctaaaaatatattttgaacaaatattcaaatttaaaaccaacgatcaattggaatacattaaaaaaaagcttatggcggttaatatccatattgccgccagttcactgacaagcgcgggatttgctttagcaacagcatcatttgtcgcagtaggcacaagactcagtcttgagttcagcgcactggcagggcaaaaagcaggtgggattgtaggcgctattgccatatacggcgttgtccagaaagcggttaatagtgcacatcgtcttcacatgacttatcctgcttactactcagcgctatacgcgaaagagctggaaatgatgtattttctgatagaacctttgtttgaacgcgccgaggcgtttaaagcacaatgggtatcggatgatgaaattgcagatatcatcaggaggatgatccaataattatgatggatttgattaaaagattgctcaggcgaatatttagatccctggtgtcgtattatggccccgccgcgctaacaatagtatttgctttaattcaaggtctatggtttccggagagtcctgcctggcttacccccgtttttttcttatttgtaatttttattttttaacgatacgtaacatggtaattccagaaaattattaccctcctgaatatataaggaaatagtatgtctacacccgcacatttatggcttgaggacgaaaatggttctccaattatgggtagctgtttaatgccgctacgaatgggatctatcgagttaaaatccttctcccacggtatcactattccggtagatcccagttggggaaaacttacgggtacccgcgttcaccgccctatcacgatagtaaaagaatttgatcagacaacaccgcttctgtatcgcgcagtctgcgaaggccgaaccatgaagacggcgacaatcaaaatgtatcgtattctcgaatcaggtattgaagccgaatatttcaatatcattctggaaaacgtcaagtttacaacggttgcaccgtacctctctccaaacggtataagtagtactcatcttgaaacgctcgaattgcgttatgaggcgatcacctggaagtatacggaaggaaatattatctatcgtgatagctggaacgatcgttgctgtgcgtgatgacaaagggtttcacaggaggtcaaggcttcctgtgagcctcacgaggacatcaaccgccggcgggaaatctggtggataatttagcaccaacaccgtggcaatgctctaccttagcgctccaaccgggggagaatgttcagcataaaagtgacgttgtcacatagtaatttttcaaagagaataccgctgctcatggaaaaatcgctttcaccaccaaggaggtgaataattttattttttataaacaacacgttacataagatctcagtacgtttaatctcagactaataatcaacatcattgattaaaatgtttaattgaatgaatcgataaagagagtattgttaaaaacaatgatgagcggagataaataaatgttacgtgattttttgaaggtagaaaaagaggatcgtctggtcgaacaacaggacgccagcagcggtaaagagaattcaacggacgtcaccgaatggattattgtgaataaaaatggtgataaaaaaggccgggtggcgttattcaatcaatttaccacccgccgttcctattgcgtgaattaccgcatcacccagtttgataatagcggcaaagtggttgtcgaccggctggcggaatcaatctgatcccagggaacgttgtcacgccggcgtcccgcgcctttagcccggcccgtcgctggcggcggccagcagcggcacaatcacatcgcttaacggcgtggggatatggtgaatacggccatatcgctgaacgaccccgttgcgaatatcccactccagcggcagcccggcctcgcgatccgtaagtattgaagtgcttaaatccggaggcgctcggtggaaaccggcgagaatttcctgcggcacggcgtcgtccaggctggcgcctacggcgcgagccaccgtcagcccctcctgcaaataggttaaagcaagcgccgtgatatcgtcgcgggcaaacatccctgcccgcctccccgccagcaccatcagaccggcgaccgcattctgcagcagtttacgccacgcaacggagagaaaatccgcgctgatatccacttcacagcgcgtgtcccgtagcgcgtgccgcacccgctcggccccctcaacatccggcagcgtcaggcgcggtttcgcccgcagccagaccgacgcttcaggttcacgctgggcggggaaccagacgaccgatggcagcacggtagcttccgccacgtacggcgcgaacagcgttttttgttcaacgccgttttggagcacgcagactaccgttcgatcgtgacacagcgcttgcagccacggtgcaatagccgcaatttgtgtcgcttttaccgccacaaataccaggtcgtacggcgcggcgaccgatgccggttccgtcaagaccggccccggcaccacaatatttccgccatcaaaacgcagcgacagctgcgggtgcgcgcggcggccgcataccagaggcgtacggccaacctcgtgcagcgccgcggcgatggtggtaccaattgcgcccggaccgatcagcgcaacggtaggttcttcaactgtcatctatgcctccaggccgcttccggcccctgagatttcattggtacgtaacataaacgcgacttcgttcgcattaccattttattcatatgggtaatctgaatgtgtgtgtcagcgtacacacttttcaccatcaacaaggaaggtacatgtttccagaatacagagagctgatttctcgattgaaaaccacgcacccgcgctttcagtcgctattcgaaaaacataatgcactcgatcacgacatttcgcgcatagaaggagtcgatggcaaaggatacagtctcgagcttgtacagatgaagaaagaaaaacttatgttgaaggacgaaatgctcaaaatcctccagcatgaaagcctgatgtaaacgataaggccaccggatggcggccttcttatagcaccaggctacgagcgaataaacgccagcagatcggcgttaatcacatcggcgtgcgaggtatgcataccgtgcggaaagccgggataaatttttagctggctgttcggcagcagcttatcctgcagtatcgcggcgttttgataaggcacaacctggtcgtcatcgccctgcatcaccagcaccggcagcgtaatggcttttaaatcttcggtctggtcagtttcagaaaacgccttaatcccctcatagtgcgcttttgcgctaccggtcatgccctgccgccaccagttctgaatcgtgccctgggacacctgcgcgccttcacggttaaagccgtagaacggcccggacgctacgtcgagataaaactgcgagcggttggcggccagcgctttgcgaaaaccatcaaacacctcgattggcgtaccgcccggattactctccgtttttaccatcaatggcggaaccgcgctgatcagcaccgctttggccacgcgcccctgcggctgaccatactgcgcaacgtagcgcgcaacctgcccaccgccggtggaatgcccgatatgcacggcgttatgcagatccagatgctccgccaccgcagaggcatcggcggcataatgatccatatcgtgaccgtcactcacctgatctgaacgaccatgaccgcgtcggtcaatcgcaatcacccggaacccttctgccaggaaaaacagcatctggttatcccaatcatcggcgcttaaaggccagccatgatgaaatacgatcggctgcgcctccttcgggccccagtctttaaagaagatattgacgccgtctttggttgtcacaaatgccatgttacaaactcctctcgtgagaaaacaaggctgcgggcctgacgcctgcagtgggtcgggtcttagggcgggatgctatgtccggacgatagcgtctcgttaggtgtgaaaatgacctggctggaaaagtgtagatgatttttgtcgatactgagcgttcgctttgtatccgataaatgggctgtaaacagcccatttaagcatgcagaaaggaaaatttaacgcagcacgaacttaataacgccggatggttaccgtttcggctcccgcctggtcgagcgcggcgagtccctcctctatccgcccgaggcttatcagcccgggggagtggcgaaaatcctcgcgaaaaatggccagattgccccacggcgcgtaataggcgatgtcgccgcgccgtggggtcattgaggcgccagagtccgcgtggcgcagtttcgtcggcagccaggcgattttttccgtggaaccataatcctcgagcttcaccgtcatcggcagctgcgccaggaactcattagccgctgcgctctcatccagcgagccgacaaccgtggcgccattgaactcaaactgaatcttcaccgcgttctcccgcccggcggcaaatgccgcccccgtcgtagcaataaaaatcaatagcgtggcgctaagagagttgaacatccgctcactctgccaggccacgagcgcgcaggacttcactcaccaccgctaccgctgaaaaggcatttggccagccggcatagaaagcggcatgcgcaacgatctcccccgcctcttgcgcggtgaggccgttatccatcgcccggttaaggtggtagccaatttgcgcgctttgcccggcggcaatcaacgcgctgaccgtgaccaggctgcggtcgcgcggcttcagccccggtcgctgccacaggtcaagaaacagcggttgagtcgtaaacttcaccagtccaggggaaatcgcgccgaagttctgttctacggttgttgaacgctgattttccaccgcctgattaagagggagcagctccggggaggcagcagccagctgctcgcggccaatgccgcgcgcgacaaaaatatctttcgtcaccgcaacggcggccatcgcgttgggccagccggaataaaaagccagatgcgtgatgatttctgagatttcagccgccgtgacgtcgttatccagagcaacctcaacgttatgttttagctccgccggctgattacgggcgataagaatcgccacggtcacgatgctgcggtcgcgacgcgagagttctgttctctgccagagatcccctatcagcacctcgctgccgaaacgggcaagcgccggcgcgacggattgaatatcctcagcggacaatacggatggactacgtggaaccattttttcacctcttttttcttctgccagggctggcgcgcccagcattaacgacattgcagctacggcaataaaagctttcatcctgaacacctttccgacacgttaattcttcagcctttccaccagttgacgctggtactcaggcagttgatcgcggctggcacgctgaaaaaccagcggaggcagccaggtcattcccgcatgcagcgcgctggccttcattggcgtaaagacgtcggccaggctgacgcccgttcgcccggtctcgccgtatgtcgcgtcaccgcctgcggccgtcgtgacaatcagcatctctttgccctgccatactcccggccctacgctgccccaggtatcgttcagccaggccttcatcatcggggtgatgttgaaccagtgggtcgggaagataaaaacgatgcgcgagtgttcccgcatgagccgtcgctcttcatcggcattgatatttcgggtatcaaaaccgtaaagcgcctcgagattgcgtacggtcacgccgggtacgctttgcgctgcggcctcaagacctttggtcatgaccgattgctcaggatacggatgagagacgataaccagcgtattagcctctgcggcacggctggtagaggtaaagctaaacagaaacgcggtgacggccaaaagccagaacagaccgggaatacagcggtgcgaatagttcatcaagctctccttctcttttgccacagggtaaggcgcggaataagaaggagccagccctcgctatcgaatggggctgtgagttattttcatcaatcgggctacagaccgagcggcttcatttcccgcacaagggagattaacaggcgcagcccggtgggaacctgatgacggctggagtaatagatatagaatcccggtccgtatgaggcccagtcggtcagcaccagacgcaggcgccctgcgctgacgtgctctgctatcagcggttccggcaggtacatcaggccaaacccctgcagaatggccaccacgcccgtctccgccagatcgaccgttaacagcggcggtactttgacggtgagctgctcttcgccacgttcaaactcccatttataaatgcggttgtttcccagacgattgctgacgcagcggtgctgttgaagatcgtgaggatgccggggctcgccaaaacgggcaagatattccggggatgcggcgaccacccagcgcacatcggcagacagccgctgcgccaccatatcttcaggcacggttccgccatagcggatccctgcgtcaaaccgcgcttccgttacatcaacaatgcggttgctggccacgatatccagctcaatatcggggtaacgttcagcaaaaacaggcaggaccggggccagcagcagcgtggccgcctcaacggcgacgttgagccgaatatgtcccgcaggcgagtcgcggtacggattgagctgttcaatcgcgacatcgattgaagcgagcggctcgcttaccgcgttgatcagactttcaccggccgccgtcagggaaacgcttttggtcgtgcggttcagcagacgcacgcccagccgcgcctcaaatcccttgatcgcgtggctcagcgtcgatgcgctcaccccaagttcaacggcagctttactaaaactctgatggcgggagatggcgaaaaaatagacaagatcggccatgtcggcacgggttacattcatacggtctcgctaactggatggaaattaagctgaaaaacaacgttaccttgatgtgatggcgtatcgtgacgttgatccgaccaggaaaatcaaagacctggatgcacgaacaatcttccgggcggtatgtttatactacaggcgtcagccttgataaactgaccttccgaccggagaaaacccattttatccgccagaggcgcatgtatgttacctgattgcgataaagccatcgtcctgctgcatgaaatctacggcatcaacgcgcatattcagcgaaccgccgcgacctggcgcagccgcggcttcgatgcgtacacgccagcgcttttccctcactctgcgccgttcgcctatgagcagcaggagcaggcctggcgccacttttccgataacgtcggatttgataccgccgccatcgtgtcgctgctggccgagctaagagcgaaatacggcacgctaatccttatcggctacagcgtgggcgccaccttagcctggctggccgccagaagcggactctgcgacggtgcggtttgccactacggttcacggatccgccagtactgcgatgcggcgcctccgtgcccaacgcaggtgattctcgcccgccatgaaccggcgttcgatccccgcgccctgcaaaacgagctggagaaatacccctccgtgacctgccggatgttcaatgcgcagcacggcttttgcgatgccgacagtccggcgtgggatgcgcgccttgcacagcaggcggacgaagacacgctgcggtttttaacgcttattcagtaaagacaggaggcctgatgcatcagatatttcgatggattaacgaacccgcgacatggtcagaagaggacggcgaactgcgcgtcgtcaccgatgcacaaaccgacttctggcgcgaaacctggtacgggtttgagcgtttttccgggcatatctacgccacggaagccgcgggggacttcacctttcaggtaagggtgcgagcagatttcagtacgctgtatgaccaggcagggatcatgttaatgcaggacgccaggcgctggattaaggccggtatcgagtacaacgacggcgcgcccgctatcggtagcgtactgacgcaggaaacatcagactgggcaaccggtattttcccgggcgaccccggtgagttctggctgcgtctgacccgccgcggagaggcgctgcgcctgcagtattcaacggacggtcaactgtggccgctgctgcggctgtgcccttttccgggcggcgcggcgaaggtcggcatcatgtgctgcacgccgcagcgcagcggcctgcgggttactttcgaccagatatcactgctgccgccgaatgataaagatttgcacgatctgagctgagcagccggctcgcgcgcgggcaaaatcgctgaagaatcgcgacggaggtatgatttctgactccccgggctgcccgtgctcgcgccttgctgctagattggcagcagcaaccttcaggcgaaaaatgaggaggagtcatgttttcctacatcatgctcggcactaacgatctgccgcgcgcgattcgtttttacgacccgttgatggagatgctggggcagccccggagcggccgcagcgagcaaggcgcatcgtgggggacattcagcggaaaccgcaccatcgggctgtgcgttggcaaaccgttcaaccagcagcaggcaacagcgggcaacggcgctatggtggccctgaacgcacgttcggttgagcatattcagcagctgcatcagctggcgctacgcctgggaggaagtgatgaaggcgccccaggacatcgcccgcagtacggtgaaggtttccacagcgcctacgtcagagatccggacggcaataagctggcgtttgtttattacgcaaacgcagactaaaccccacgccggaaagttaatgcagggttagcgcatggcgaaaccctgcgcaacaaccctggcaactctcaatatagcgacggatgctctcagccagatgattcgatttcggcaaatggccatgcaaatcgcggccttgtctgcatcagccttccgtaaacattcccgacctgaacgtctccctcatggcttcgatctcttgctggcgggccgcctttaaggcagacagcatattgcaggtaaaatccacaaagccaacgccgttggcggtcaccaggttaccgtcgcgtaccgaaggctcgtttctgtaccgcgcggcgccgctgtaggctgaccccgcccggctctgcaggtaggccagcccgttcgaggtgtggtcgacatcattgagaaagccatgcgcgccaaggaaggccgaagcgtcgcatatcgcgcctaccacgatctgccgggcctgcgcttgttctaccaaaggcacaacccgccgggcctcctctccccaccagttcattccgcccaccagcaccagcgcggcgtaatcatcgggtatcgtctcgaaggtataatccggcaggcagcgcaccccgccaattgacctcaccggccccttatcggcagccacggtcctgacttcgtatcgcggttcccatacgccaaacccgcggcgcagccccggtgccagcagcgcgaactcccagtcggcgtactcctggatgaggacaaacagcacttctttacgcgtatccatagacatcgcactctccttttattaacagaatttgccgtcgcagcatccgggataccgatggacactatcgccgtaccgccgccaaaaactgtataaattcacagtataaaaggcaaggctattttgctccttgcggcaacccgaatcgatttttgcgagtcagctccctggatagaaaactatccggggcaatggctatcgtctcccgcgcgctgagcccgcgtttaatgaaataggcctgcgcgccaggagaacctccctcgtgatgtacagcgtatatccctccggccgcagcctgggcgcccgcagttctttcagcgtaataccgacgatatctcccgattgaagacgttgacggatcgcgctaccgctcagccgcagcgctcgtctcaggaccgacagcaggctggtctgaaaggcgcgcgtgaccctgacatccaccctcacctgagaagcgcgaacaaggttgatgcgccagcgttcctgaaccacaaagtcaggcgtacccgatagcgccgcgcgattacgccgcagaacgaccggatcgtgagagtaagcctcgacggcagatttatcgttagcgataagtcgcgcgtagagctgcggattgattttgctgacgggcaaacgcgagaacaggctgatgttccaggtatacgcgcagcgcacgcacttatagatactccagacatcgagcacttttttttgcgagttgacccggaaggcaccggatggggtgaaatcctgctgcccatgacaggcggggcagcgcttgctaatcagctgatagccgactggcctgacgttccatgtaattttcatggtgaacctttttttaacccatacaaaagcggatccgtggaaaacggaccgtgatttttgcgatgtgaaaaatatttagagaatacttttcagtgggttaaaaaaagatttccaacgcgacgaccctgtctgaccgtgaatgaatgcgttcaagagtagcaaagcggcaagcgggctaaatatgcattaaatcaataaatacatagaaatcattcacaaacgacgttgtttaccttctgttcacaaaacgagaagcggctcactgatcaaacaaacctaaacgtttatgtttagcttcataaacgtttaggtcaaggaaatagccgtctgtatcgcgggtaatttcataaatacagagagcgaaatatgcgtaaagcaacgatgcgggatgtgagtgaagcgacgggattttctatgtttaccgtttcacgcgcgctaaacggtggcgatggcgttgctgacgacagccgggagctgattttaaaagtagcgcgagaactcggctacgtacctaaccgcgcggcccaggcgctacgccgctcaagcagggactcggtggcggtgattaccgcccatgcctcgaactcttactaccttaacctgatgtccggtattcagcagatgctgcagccgtcgcagtggaccgtagtgcttggcgatatcgcggtcaacggtacctacgaccgcgcgcaggaagatcgcatgattaaccgcctgatcgagtcgcgaatggccgggatcatttcgacggtgacgcttcagccggaaagcctgagcctgctggcgaaatgggatattccggtcgtcttcgttgactcacctccccgcggcgagcacaactttcccagcgtcacgaccgacaattatcaggccagcctgctggtggggaaccatctggcgcagcacggctataaaagctggctgctccttatctacccggaccgctggaccacgcgttttgaacgcgagcgcggtattcgcgagtccgcagagcgctgcggcgcaacgcttgaagttgtcgaaacggagaacgacgcgcagtcggctgcggacaccctgagccgatacctggaccgccagacatcgctgccggacgcgctcattgccggtaacaaccctattctgctgggttcacttaaacagcttcagcagcgccagatagccatccccgacgatatggcgcttatcgcctacgatgaattcgactgggcgccgctattaaatccgccgctaacggtgcttaatgaaaacagcgaagagattggcaggcagtcggctgaaatgcttatccagttaattaatccggaaggaaaaggagaaattaatacccagcgtaaagttcccgccgagctggttattcgccagtcctgcggctgtagaaaataaataaccattaaaaagaggcaattgagattgctgacaacgtatcgcccggacggcattgcccggcggcgcttcccctgcacgggccgacagaaatggcgcttgcggttttcgtcggccgggtaaggcgccacccgacaaaaaagcgggctacggcgtgctatacgcgctcatcattttagcgatgtaaataacggctgaatttcagtcgctaccgaaaaacaacatcaggggattatttctgaggcttccccacacctggccgtaccttataccacacgataatgaaaggagcagaatatgaccaaacttcgcaaagcatggctggctgtcgcggttagcgcggtaatcaccaccatgacagggtttattcccgcagccagcgccgcgccgcaggatggcaaaaaaatctcccgcatcggcttaatggtgcaggacatgtccaaccccttcttctcggcaatggaaaggaacgctaagcaggccgcggcgcaaatcggcgcaacccttaacgtacaggatgcgcaggtcgatctggcaaaccagaacacgcagattgacgcgtttattcagcagaaagtggatctcatcattatttccgccgtcgatgaatccgggatcgagccggccattcagcgggcaaaagccgccggaattatcgttatcgcggtcgatacgcccgcgaaaggcgcagacgcggcgatcatgaccaacgccatccaggccggggaaacctcctgcgaatacctgttcagccagatgggcggcaaaggcaaagtgctgctggtggatggcacgccgattcagaccattatcgaccgcatcaaaggctgtaaaaacgtcgcgcaaaaatacccggatatcaaaatcgtcggccagcaggcatcgcgcaacgaccgcgcttccggcctgatggtgaccaccgacatgctcacggccaatccggacgtcgccggtattttcggcatgaacgatccttccgcgctcggtgcggtactggccgttgaacaggcgggcaaagcgggcgcgatcaaagttaccggcgtcgacggtagcccggaagcggttgaagaacttaagcgcagcggttcgccgtttatcggtaccgcaacgcaaaatccgggcgaaatggtgcgccaggccatcacgcttgctcaggatatggtcgacggcaaaccgatcgcctctcataccgtcctgatccccagcgtactggtcacccgcgataacgtcgacagctatccgggctggtaatcacttcgtcactttaagaggcaaaaacgggatgacgctcaggttcatcccggagggcaaagacaatggccgatacaacatcacctcccttgctcaggctggaagggatttcaaaacgctacggcgcgaccctggcgctgaacaacgtacgctttgatttattcgccggagaggtccatgccctgatgggggaaaacggcgcgggcaaatccacgctgatgaagatcctctccggtaacgagcagcgcgatagcggcgttatttttatcgacgggcaggagattgatattcgcacgcccagggatgcccgcaaatatggcatcgccattatccaccaggagctgaatacggttcccgatatgacggtggcggaaaacctgtttctcggccaggaaccgaccgctttcgccggtattctcgatcgcaaacggatgcaccgggaggccagagagaagctggatcggattaacgcggacatcgacccgcaggcgccgctcggctcgttgagcatcggacgtcagcaaatggtcgagatcgcccgcgccgtcagtgaaaacgccaaagtgctggtgcttgatgagccgaccgccgccctgtcgcgggcggagactctccagctataccggctgatcgagcagatgcgtcaggatggcgtcgggatggtctatatctcgcaccgcatggaagaggtatggcagctggcaaaccgggtcacggtcttcagggacggcacgtggatcggcacggaaatcctcggcaacgtctcaaccaccgatatcgtccgcatgatggtcggccggcaaatcgtcgatctctatcagcacgagccgcgtacgcccggcaaggtactgctggaagtcagggatctggcaggcagtgcgaccggcccggtctcctttgaggtcaacgcgggcgaagtggtgagcatgtccggtctggtgggctccgggcgaaccgaagtcgctcgcctgctcttcggcgccgacccgcgcacccagggaagcgtgcgcattgacggccgggcgagcaatccggcagaccccaccgccgctatcgccgacggtatcgggatggtgaccgaagaccgcaaaactcagggactctttctcgggcattcggttgagcacaacattgatatcagctcgctggatagctttgtcgccggcggcgtggtgaaacgcaagtcgattcgcgccgccgtccttgagcagatgcgcaggctgcggctgcgggaaaatgcggttgaactgcccgtcagcgccctgtccggcggaaaccagcagaaagcggcgctggcgcgctggctgctgcgcgattcgaggctgcttattctcgatgaaccgacccgcggcgtggatatcggcgccaaaagggaaatctacgaactgatcgacaagctcgcccgcgcagggaaagccattctggtgatctcctccgatttaccggaggccatcggcattagcgaccgcgtgctggtcatgcgcggcgggcgaatcgttcatcagttaccctcgttttcagccacggaagaagaagtgatgctgcacgcaacaggaacctttaccagtcaatccggagaatgccatggacaacaataaacctgtgacggaattgccggtcaaagcgccgtttgattttgcgaaatggtgggatcgggtggggatcttaatcgttctgctggtgctgctgatcctgatgtccaccttcgcgccaaactttaaccgcgtcgataatctgctgaatatcgcccgctcgatttccgtcaacgctattctggcggcgggcatgaccttcgtcattttaaccagcggcattgatttatccgtcgggtcaatcgtcgccgtttccggcgtagtctcagtggtcgcggcgatggccgggctccctgcgccgctggcgattctggccggcgttggcgtgggcgcgctgtgcggtctgcttaacggcgtgctcaccgcctatctcgccctcgcgccctttatcgtcactctcggcacgatgaccttcctgcgcggtatggcctacaccattaccgaagggcagcctattgtgtcgagcagcctgagcttccgcgagctgggaaatggctatcttgccggtatccccgtgccggtcattattatgctgattgtttatctgctggcgtggttcattcttgagcgcacgcggttcggccgtcatatctatgccgtcggcggcaacgcccaggccgcgcgcctggctggcgtacgggtcaaacgcgtgctggcggcggtctacatgattgccggcgtctgcgcgggtctggcgggaattatcttcgccgccagggtgatttccgcccagcccacggcgggtacgggatatgagctggacgccattgcggcggtggtgctgggaggcaccagcctcgccggtggacgcgggcggattatcggcaccctgattgggtcgattattcttggcgtactcagcaccggcctgattctgctgagcgtgccctttttcacccagctattgattaaaggcatcgtcatcattcttgccgtggcgattgacgggctgaagcagcatccggagctgtttaccttctggcggaaaaaagagatcgcccgtacccgctagctttccctgacgctttgtttatccgccgcgctggcggcgggtcttcgcacgcttaaattttaatggagtataccctcatgacatatcacattacgctgacggacccgatgaacggtacccgggatcgcgaaccgattacgtttattctccctgaaaagctgcaggagccgctgtggtgggcgattaccgacgaggatgcgcggatcctttgccagcgccttgagcaggagtcgtcggcaagccgtaccgcttttatcgcgacggtcagcttcagcggtaccctcaagatgcggcttgaccgcccgctcacggcggctgaagccggtgaaatcgccggtatccaccggctgcctggccgggaaaaagactgttttgtccgtctcaataccggctgcttcgatctggaaatgtgtcggggaaccgcccagggcgtcggtgcatccaagtgggggctgcgccattttcgcgcgctgcaggacaacgtcgagctgcttccttccggaaataacgccattggcgggttttacggcccgttttttaccccggaaaatgggctgataaacccgccggagcataccctcgttgatattgagatcctcgaggaaggcccggtctatcatcactaccgcatgcgcggcgcgatccccgacggattattaccggagctgcgcggtaaacgtttctccatcgactggaaatttagctggaacacgccctggtttcagcggcgctactgcatagatgatttttcaacggtgattaacggccgttcggtgaccaacaagatcaccgtcggcgacgaatttgagagcggtccaggaaaactgctgttcgatcgcttcgcggcgtacggcggcacccgctatcgcgcgggcgacccctatgccgaagagctggtcgccatggtggccaataccgtcaccacctcggaaaaccagagcccgaaatttaccgaattccgcgaacagctcgccgatatggcctccgcccactgggatctctactggcggatgttctgccgctgggagaacgtgctcgatgaggcggagattcgcgaacggctgagccaggttcgcgcccgggcgcatcgcagagccgatctcaccgagcgggaatggctgctgaccgattcgcccgttgacgtttccgccgtcgcggatgaaaccatctttcccgggccggccagtaaaaccgtcgagtatgattcagcgagcggccgggcgatgatctggtggacctcccgcccctccggcgcgtttcagatagtccagcgccgccagtcaggatgggttaactggggcagcaacggcgaaaacgagtgtccggagctccccgtcggcgtcgatatcaagaccgcctgcggacgttttgccgaaaactggatgcaggtagccgatcggctggaaaccccgccggtggtcgcggtgagccggggagaaaagccatgatcctctgctgcggagaagccctcatcgatatgctgccctgtcggagccgcgagaatgcccccgcctttactccctgcgttggcggggcggcgttcaataccgccgtcgccctgggtcgccaggggatggcggtcgcgctgttttccggtttatcggacgattttatgggtgacatgctgcgccacacgcttgacgcctccggcgtggattattcgccctcaacccgcgcgccgctgcccaccaccctcgccttcgtcaggctggtaggcggtcaggcccgctataccttttacgatgagaatagcgccggtcgaatgctgactgaaaacgacctgccgacgctcggggatgacgtctccgccgttctgttcggctgcatcagcctgatcgccgaaccgtgcggcagcgtttatgaagcgctgatggtaagggaagcgccgcgtcgggtgatgttcctcgaccctaatattcgtgaaattttcatcccggaccggcagaaacacctggcgcgcatgaggcgcatgattgcattagcggatatcgtcaagctttccgatgaggacctcgcgtggtttgccgaacccggcgaagagcatgaggtgataggccgctggctgtcgctggggccgaagcttatcgtggtcacccgcggcgctgacggcgctgatgcctggaccgctgattttcatctgcatgtgcccgctattcgcgtagcggtggccgataccgtcggcgcgggcgatacggtgaatgccggtattctcgccagcctctcgcaggccgggctcctggagaaggagaaactagtgacactgtcacgcaagcaggttcgccaggcggtggatctggggatgcgcgccgccgcggtgacggtttccaggccgggcgctaacccgccctgggatcatgaactctgaagacagcggacgccctgtcagcaaccgacagccagatgagggtctgaaacagcgtttattgacggacccttatcctgatttatgttgtatatgatttgagtcccaattattgaatgaaagctaaaccagcttcatttattcatgggttattgccgactaatccattaatatcagctaattagatcgtcattcagtttctgtcgatcgcgttaacaggcatcagggacaggacgtcaataatgaaaaacaatccatggttcgtgcgtttgcgtaatacctctattccgcagcataagctgcgtccggcgaaatggctggtgctgattgccctgctgctgctgctggcgcagttgacgatagagtttttactcttagcataagcacaataaaatcggctgttggtgttcaaattcgcaagcgctgataagattaaactcaagtttaattcgtgataagcatctcagtttatcaacaacggctagacagaaagaacgcaggcatgctagtaattaattcaagcaagggaacggatttaaattaaacacgatttaaaccctacccgtcaggctgaaaaattaattgataatggtttggattgctgaacgattatcaaaagggtaagtgaatcgaaggccctcagagacgaaagtctctgagggccttttttgttttttttctatctcaggagtcaaaaaatgtctaaagaacgtcgtctctctcgcattttcgcaaaagatggtaaatcggtcacgctggcgctggatggctactatttttcaagcaaaacaaatggtattgataatacgataaatcagcttccggcccttgttgaaagcggcctggactgcgcgctggtcacttatggcatgttgaaaaatttccgcgaagttttcaattgcgttcccgttgtattacgcgtcgatagcacagtgaatatttttgataataccgttcccgatacgactcccgtcttttccattgaggatgcgctgaaagtggctgcggaaggcgtagtgtgcatgaccttccccggcgcgttcaatgaagagaaaacgcacatcatggcgatgcagctggcgcaggccgccgatcgctggaacgtgccgctgatcgtggaatccctgccgtacggctatcccgtgaccagcgacgactccaacaacccggccgttatcgccgcctcggcccgcatcgccgtagagctgggggctgacgtgatcaaaacccgctttaccggtaccgaagatgatcggcttatcgtcgaagcggccggcgtgccggtactcgcgctgggcggcccgaaaaccggcatcgacggttattttaaatttgtgcagcactgtatgcaggtgggtgcaaaaggcgtggcggtgggccgcaatattactcaggacccacagccggcaaaagtagtagcaggtctgaacgccatcatccatgaaaatgccacagcggaagatgcctacagcctctacatggctaaataacatcggatattaatatgttcttaaataacaccatcattccttccgtcagaaaatataaacattttgaacaggcgctggcctgcgcatcagaatacgtactgctatccgaagcaaatatcggcaacctgcaatcgctgattggcaaatgccatcagcgcggcaagaaagtgcttattcacctggagctactgggcggttttaaacccgaccaggcggggatcggtctgctcaaaaattactacaaggttgatggtgttatttcgtccaatctctcggccctacgctatgccaaaaaagagggattgttaactatcttccgggtattgctcatcgactcgcgttcgctggatcactccatcgatattgttaagcataacccgccagatgctattgaaatcttacctgctgaatatgcctgccagtgtctggaattgattagccggaatttaaaaggctttgacgtgatattcatcgccggaggctttgtaaagcggaaataccttgtagataaaattttccatgccggatttaaaggcattaccaccagcgaacccggtttatggtaacgcataaggagtccacgccaatgaaacaacactacgtcatgggcattgataacggcggcaccgtcacaaaagcggcgatttacgatcgcgccggcaacgtggtggccagcgcgtcgaagtcaacgcaaatgctgaccccgaaggaatttcacaccgagcgagatatcaacgaactctgggcggccaacgttgaagtcattaaaacggccctcgcgcagtcggggatcgacgccagccagatcaaaggcgtggcggtcaccggccacggcaacgggctgtatatggtggatgaaacgggcgccccggtgcgcaacgggatcatctccaccgatagcagggctaagggctgggttgaaaagtggtaccgcgacccgacgtttgtcagcgacattttacccaaaaccatgcagtccatctgggcaggccagcccgtcgccctcctcgcctggctgaaagagaacgagcctgaagcgctgaacaacgcgcgctacatattcatggtcaaagatctgattcgtttttatctgaccggcgaagcctttctcgaacttaccgatatctcagggactaacctgatcaacgttcgcgaccgtgactatgacgcctcgctgctggcctggtgggggctcggcgatctgcgcgacaagcttccgcccattaaacgctccaccgattgctgcggctacattaccgacgacgtcgcgcagctaaccggtttgtgtgccggcacgccggtctcgggcggcgtgtttgatatctcggcgtcatccgtcgcttccggcatcaatacgctggataagctggcgattattaccggcacctggagcatcaatgaatacgtgaccgaccatccggttatcgaccgggatctctttatgacctcgatttatccgattgagggcaaatggttaattaccgaggccagccccacatccgccagtaatctggagtggtttatcaataactttatggaaggcgatcgcaccgccgcggcggcgcagggatcgtcagtctacgatctgtgcaatgatctggtctccacgacaacgcccgccgagagccacctgctgttcttcccgtttgtcttcggctccaacaccatcccggacgcctccgcggggtttatcggcctgaatagcttccataaaaaagcgcattttctgcgcgctatctacgagggggtcgccttcagccacctttatcacaccgaacgtctgcgcaacatcaaccctgatctaagccgcaccattcggattgcgggcggcgtcactaactctgcggtctggctgcagatattcgccgatattttccagtccaccctggagattgtcgacgtgaaagagcacggcaccctgggcaccgcgatgaccgccgcggtcatggctggctggtttgatgacgtctttgttgcctcaaatgagatggttcacgtttcgcgaacggtcacgccgaacccggataataacaaggtctatcaggataagtatcagctctacaaaaatctgctatcggaaatgcagtctccgtggaaaagctgcagtaactacattacgcattaagcgaggaaagtatggatctgaatttacaccaccgcacggctatcgtcaccggcggcgcaacgggactgggcaaagagtttgtcctttccctcgccagagaaggggtcaacatctgcttcacctatatgcgtgatgaggagcgcccggagcagctgatcgatacggtaaaaaatagcgccagcgtcgagattattgcggtgaaaaccgatctttccgatgagcaaagccgggagaatctgttcgcgacctgcattgagcggctggggaacgccgatattctggtcaacaacgccgggatctggctaagcggctacgtcactgaaatcacccagcaggagtgggacagcgtgatgaacgtcaacctgaaggcggttttccacctgagccagctgtttgtcaaccactgcctggcgaaagatcgggccggcagcatcctgaatatcacttctcaggcggccttccacggttcgaccaccggtcatgcgcattacgcggccagtaaagcgggcctggtggcattttctatctcgctggcgcgcgaggtggcgaaacagaaaatcaatgtcaacaacatcgccgtcggcattatggataccgcgatgatccgtaaaaacattgagcagaatcctgactattacgtcagccgtattccggtgggccgggtagcccagccgcacgaaattgccgacatcggcgtcttcatggtctctccgaaaaccagctatatgacgggagcgactctggatgtcaccggcggtatgttgatgcgttaatttatggagaatcattatgaaatgtctggcaattgccgatctgtttatcaatgcagcgatgatggacgcgggtctgaaagcgctgaaagataaaggcattacagtggaagtgcgcgaatggtcgcacgaatcgattgaaaaactgcaggaggataatttactggttgaacagcaaggctccgaagcggtggcgctgcctgccgccctgcttcagggcgctgaggaggttgagatcctgatcgtccagttcgccccggttaacgcggcggtattcgacaagctaccaaagcttaaatacgttggcgtgctgcgcggcggcattgaaaacgttaatcaggcggaggccaaagcgcgcggagttgaggtaatgaacacgccggggcgtaatgcccgcagcgtggcggagtttaccgtcggcatgattctggcggaaatgcgcaacatcgcccgctcgcatgatgcgctgcgcgataagttctggcgcaaagagagtccaaaccaccgggccattcctgaactgggcggcaaagtggtgggtctggtcgggctggggcatatcgctcagctggtggccggcttcctgcgcggtttcggcagcgagattatcttttacgataagtacgtccccggccatgacagctatgaaaaggtggattctctcgatgagctggttcgccgtgcggatgtgatttcgctgcatgcccgcatgaccccggaaacggaaaacctgattaacgtacatcattttgaattaatgaaggagagcgccattatcgtcaataccgcacgctccggcttaattaatgaaggcgatctgatcgctgcgctgcgggacggtaaaatcatgggcgccgccctcgacacctttgatgatgaaccgctgccggaggatagcgcgttttattcgctgaataacgtcacgataacgccgcatattgctggcagtactattgatgccttcagcaattcgccgaagattttttctgagatcttgctgaagcaactcggttaaatattaaaagagccgcttaaggtttttgctacggcccattgggcacgggttcgctcgcgcccaattcggccgccttttaaggaaatattatggatattatcaacagcattattagtctgggggcatcagtgatgatgccagtaatattctttattatcgccctgtgcttcggcgttaaaattggcaccgcatttaaagccgggatgctggtcggtatcggttttgaaggggtgggtctggtgatcggcctgctgttgaccaacctcggcccggcgtcgcaggccatggttgaacgcatcggtctgcacctgacggtggtcgataccggctggccgaccgcctccactatcggctggggctcgccgctgatgctgccggtggtcgtgggatttattgttatcaatatcgccatgctgctgcttaaattaaccaagacggtaaatatcgatatattcaactactggattttcctgattatggggtcggtcgtgtatgccggcaccggtaactactggctctccgttggcattaccttcggcatatttatcttaaccctgctggcggcggatttaaccgcaccgtatttgcaaaaaaactataatcttaaagggatatcattcccccatcttacctgtataacctacgtgccgtttggtattgcctgtaactatattattgataagatcccgctgatcaataaaattaatttcgacccggaaagtattaataaaaaattcggcgtcttcggtgaaccgctgaccctgggcttcgtgctggggctgctgctggccttccttgccggatacgatgttgcagccgcggtgtcgctggcgattaaagtttccgccgccatgctgctgctgccgaaaatgatcgaaattttagtgcagggtctgcttatcgtgcgcgatgctgcggaagcgaagctgaaagcgaaatttcccaaccgcgacttctatatcggcatggataccgcgctgcttattggcgaaccctcggtgctggcgaccgggctgctgctgatccctatggcggtggtgctggcgattattctgccgggcaaccgcgtgctgccgtttgtcgatctggcctcgctgatgttcctgctggcgatggtgacgccgttctgcaaacgcaatatgttccgcatgtttatcaccggcacgctggtggtcacctgtattttatacgtcgggacggatatttcgcgggaatacacccaggcggcggtcaactctaacattccggtgccggaagggatggcggaaatcaccaatatcgtgggcggagccaccaccccggtgggctggctggcggtgaaattcggcgagtttttcagtaccgcgccgtaaactcccccttttctcactcagcccggcgcgggaaacggcgtcgggctttttcgtctcgccctgcgttcaagcacaaaaaatgcctgccaggagggtaagctggcagacatggttcaataaaaggcgttgttttagaactggtaggttatgcccacggcaacgatgttatcggtgctgatgctggcatctttggtgaacctggtgtcatccagcaggttgattttatagtccacataggtagacatgtttttattgaagtagtaagtcgcgccgacatcaacgtattcaaccagatcctggtcgccgtagcgtcccagatctttaccttttgatttcaggtaggcgatggacggacgcaggccgaaatcgaactgatactgggccacaacttcaaagttctgcgcggtattggcgatatagcctttaccaaacttcgtcatgttgcgggtttccgcataggtggttgccaggtagatgttattagcatcgtacttcagaccggccgcccacacttccgctttttcgccacgggcgtagaagtcaggattcacgcgcccttccctgacctgcgcatcggtgcgatcggatgccgcgtaggccgcgcctgcgccaaatccttcgtactcataggtcgaggccagaccccagccgtcgccatgctgtttcgccagatcgcgaccgttgccctcttctttgccctggtactgtacggcgacgttcaggccgtcaaccaggccgaagaaaccgctgttacggtaggtggcaacgccggtggtacgcgcggtggcgaagacatcggtctgggtccaggtatcgccgccaaactccggcagcatatcggtccaggcgccgatatcataggcgacgccgtagttacggccgtagtccagagagccaaattcgccaaacttgaggccggcaaacgcgagacgcgttttgtcgccggagttgtcgccttcaacgttattggcgctgaagttatattcccactggccgtagccgatcagctggtcgttgatctgggtttcacccttgaagcccagacgggcataggtctgatcgccatcctcggacttatcgctggagaaataatgcaggccggtcactttcccgtagaggtcgagtttgtttccgtccttgttatacacttcagctgcctgcacggttcctgcagcaagaagtgtagagacggccactgttagtaattttaatttcatattatttcgtccctaactattaataaaatatcaaatctcagatgccttctgagcgaggctattatgcgataattcgcaaagagacttgaaattaaaagttccagttttttagactaaataccataactgtgacgacaacagcggttgttaattgatgtccatcaatcattcactgcttccgttggcaaatattctgaatcacgccttacgcaacccagagatgcagaaggtttgactaaaatagataaattatcataaggaaattctaatgattagataaattaaagattgtaatttgttaaaacaatataaatcaatagtttataatttacacaaccaatcattaatgtttattcataaaggcactgattcccctaatcggctattaatgagtatattccgatccttccccgcagataaattatagtgccgaaatgaccacatttctttattgaagtttctttacaaaaaccgtaaaaattatagcatagtggtttaagatgtgtttaacactttcgtgaaagggatatcgccagccctatttcaggggataagtttaactatgaataaatactatgaataaatagagccaggagcttgtcaccagtttgataagccgctgacgcgccgggaacggcttatccgtatcgggggtaaaaggaagctggcgcgggactgctccccgcgcaatgcctggattacagggtaaaaccgccatcacccacttgcgcccgggcgtaccacttcattagctcggcggttcccggcgcgttttcagctggcgcccacggggccgcgtcttgctcagaaaccggctggtaaccaccgtatttaacctcaaaaattacgccgcctttatccatcgacagcacggcatgccaggtacccgccgccatctccagcaccttacactcttcgcctaacaccacgcgctcggtcacgttgccagcatcatcaaaggtcaacaccacaaaacgtccgctaagggatgtcagcagttcaaaagtgtgcgggtggcggtgaggccgaacataggtacccggctccatagcgacggccaggcgttgcaccggatcgcttaagtcagggtggaaattacgatgggcacgtaggcgaggcgaagctgcagcctgttcgctttgttgccgaaggtcactcaacgtcatttgtttcatataagcctttattgtagttgggcagcttacggcaatcaggttgtcgtaaggcttaatgctattttcaacagacgattagcttcgccgctcgcggaacacatcgctgtgcggattatagacgctgatgccgcggtcccaaagcgccagaaatgacgagaacagatcgtggtggggttccgttgtcccccgctcgccctttgaggcaagacatgggatagatgacatgaaaaagagacactttgtgagtgcgctccttaacagtcgtggcaggtggaaaataagatgagagtgcgaagataaaggtatagtcacgcatacaggtgcagcaattaatccggcgtaaatttatcgagcagcgaaaaagcgtgtaaataattagacagcgccagtagcgcatgaaatgagttaaagccgaacttctcaattaatcttcttttatagctgctgtaggccttgggcgaaatgccgagcagctccgggtaatcttttgccagtacggtaaatttcataataaaaatatactgaaattctctctctgttaacgtgatgtcctctcccacggggataccatcagtcactctggcgataatactggcgatatgtgcggtgcgccttttgtttatcaaacaaataatattaccttcaacccggaaacaaacaaaattctttttcatttcaaagctgtttatcaaaaaatggaactgcgcgcagctgctggatgcgtactttgttaagcacaaatcgaccagattcgcctttctgaccgcttttatgtcgtttattttcagacgtatggctttcttaaaaaaatgattatggctgaaaatagttaacattcctttccctcatgaaagtgcaatcatcctttatagaaatacgtataataggcgccatggggatatacccatgaatgaagtgggtgaattataagtttgtttaatatttattgtccagacgagtgaatttcagaaaaatccctgcgaaatgtaaaccatgggattttcactggcccggagacagcgctcatccccacgcttactttaggatttttcttacgatgcatcggttaaagagagattagcagcatatcactctgcgataaagatgatacttaacaaataacattgaaaaatttaatttatcaaaacataaaactaccaatgagggaattgcgcatgaaccgaagcgcatgcgcgcgctgacttccgggcatttgtttgcccttcgtttaagtctgcgccaggcagcgacccggcgcgactcagtttatgaacggtttctggccagcagaataataatgaagagtccgccgatgccggccgtaatgatcccgataggcagctcctgcggagccagcagcgtcctgctgacgatatcaccgccgcacagtagcaccgcgccccacaggccgcataaaggaagcagcagcagatgttttacgccagaaaaatagcggcacatatgcggcaccatcaggccgataaagccaatcaccccggtcagggccaccagcagcgacgttgctaacgcgcagcagaaaaacacctccatgcgcaggcgtgtaacgttaatgcccagcgactgcgcggtctgctcaccggccagtaagccatccagggagcgccagcgcaggagtatgaatgcgccgagaagcagcagactgaacagggcgtagggcaaattatcccagcgcgccagaccgagcccacccagcgaccagaacagcaccgagctggcggcccgctggtcgcccgagaaaatcagatagctggtcagcgcgccgaataaaaaggagatcgccaacccgcagatcaccaggtgctctgcgccacgctgctttttaaaatgaaacagcagcatcaccgccaccgccgagcagatgccgccaacgaatgccgacaccggcagcgtcagcgcgccaagccgctcaccgaatcgggtgatcaccagtaccgctcccgccgatgcgccggaggaaagcccgaataaaaaaggatcggccagatcgttgcgcgtggtggtctgtagtagaccgcccacgatggccagcaccgcgcccgccagcaccgccagcagcgttcttggcacgcgcaaatcaatgacaatacgtccgatcatctccgaaaccggcacatccagcagccgcaaggcgccgagaacctgggtaagcgacagcggcacgctgcctttagccacgctgaacagcatcaagccggctaataacggcagcgccccccacgcggcccagtagtagcgacagtgagccccgctcattggtgggccgcaggatacatcgcatgagccagcttttcggccgcgttgatattcgccggcccgggcgtcaactcagcatattgcagcttcagataacgctgctgcttcaccgccggcgtctgtttcattaacggatgattttcgaggaaacggcgcagcgaatcagcgccgctgccggtctgataatcaagaagaataataaaatcgggttccgccgtcgccacgctctcccaggaggtggtcccccagctcatctccaggtcgtccatcacgtttttccctcccgccgcttcgataatcgcggtcggcatggcgtaccgtccgctggtaaagggcttatcttcgccggaatcatagacaaacacctttaatggctgcacgccccgcggcggcttaggcagcgcattcagcgtttttttccagccgtcgaccagcgtacgggcctcttgctgcttgccaaaaatcttacccagcgtcagctcatcgttatacagcaggtccatactcgctttttgtttctgagaggcggtaaagacgcagctctcgctcagcacaaaggttttgataccgtatgtttcgagcgcggaaggcgtgacctccccgccgaccttcatgccgtaattccagccggcgaaaaagaaatcaggatttgccgccagcagcgtctccagagagggatatttcggcgccagctcgggaattgatcccatctgatgtttaaattccggggtcattttgtaccatccggtaatgccggttaagccaacgatgcggtcctgcaacccgagagcaaaagccatttcagacatattaaggtcgtggatgaccgcccttttcggcgcctgagtgaaggtcacaggcgttccgcagctgtcaatcgtgacgggaaaatccgccgcgttcgccgctgaaataaaaagaaacgccatcgtccctgcaaaccatttattcatgctgcgttatcctccggaaatttatcaggcatagcctggcacctcaaaaatccgcagcgccttcccggtcatgggatgcggtacggtaaagctggtcaagccgaagaccgggtaaagccgttgtgaaacaagcacgcgctccggcacatcccaggccacggcgcgcccttgcgataaaagcaaaacccgatcggcaaaggcgtcaatcagggaaagatcgtgcaataccgcaacgaccgtgattccctggcttttcactaatgacagcagctccactctgccgtggggatcaagatggttggtgggctcatccagcagcagcagttttggcgcctgggccagtacccgcgccagcgccgcccgttgtctctcaccaccggataacgcggagagcggtcgcttgcgcagcctctgcaatcccgtatcgttaatcgcgcgggttacgatgatgtcgtgctcgcgacgcgacatatcccgggcgtggggaatccgcccgagggcgacataatcctcaagcgccagacgcaggtcgggggtatcattctgcgcaagcaccgcgatctgccgggctcgctgctgccgggttaatgcggcaatggagcggccatataaccgaacgtcgccctcccgcgacggcagttggcaatctatcgcgcgtaataaagaggttttcccgctgccgttgggcccaatgacggccagacactctcctttaccggcgctgaaatgaatgccggagagcatttccccgccgccgggccgcggtaatgatgcgatattgacgctaagcacgggatcatcggcttttccactcttggtcaaactctcctccattagccgccgctccctctctcttcagcgtggatgagcgaaacacgcgctcttttgatttttgatcggcaggtagtgatgataatcattatcatttaaaaagaaaggtaaatagtcacatattttataatgtcataaatgttatgatataacataccaaaaatgaagtgagaaatgcaacccgcgctgccctcatgccaaagagaagcgacaaaaccacgtggagttgttctaatagccggacagtgctctcttgcagcaaactcagtgaatgtgaacaggaaacgtcaggatgaaaacggtagagtttttgctttacacccttaaaccggggaccgggaacgagtttcaccggataatgaaggaacaaagcgccccctgtcatcgcgccgccggaatggatatcgtctccttcggcaattcagttgatgacaacgacgcttattacctgatccgggcctatgaggacctgacgcatttaaacgcatcccaggcgcacttctacagcagccccgcctggcgcgaaggcccgcgacaggccattatcgacaggatcagcgtcagcgtaaaaacggttatgctgctgagcgacagcgcgattgatggcctgcgaaacggctgaccctccagggccgctggcgtggcccaacaaaaaacgcgctctcttttgctgtcgcagagattctggggcccgggcaaaatgcggctgccgtgcctgcctccgacgccaccgttagttctgattcaacgactcaagaaagccctggggcgtcgtgtcgcccagctttttttgcgcccgcccccggttccacagcgcgcacagccgctgcagcgtcgcgtccggctcatccagcgccggaataacgtcggctaatcgttcgctgagctgtaccgctccgcgctccgccatcgccaccgtccggcaagagagatgcgcgcgcgcgggctgaaagcttttatgagcataaatctcaagacattgtatacgcgccggacaggcgttcagcgcctcggtcagccagctatcgaccagcgcgggagagatcccgcaatagatgcggccaaagcaccaaccgctgatcggctcctgcgcccagagcagatgatgttcaccgccgtcgtccatcgacagcgccagctggcgatagtgcagcgtcagggtatccgcgcgcattcccgcctttaacgcttttttcccctgcagcgcggcatttttccgtccttcatgggccggacgcagatagcggtttagcgtggcgcgggaaacagcgatgcccagcccctcattcaccataaacagcagttcgtccagcggggcgcgcagcgcatcgcggagggcgttaatgagaatctcctgctcttgtctcagtactttgtgtatcaaatgcggcgtggtgtggttatcggaaatctggctgcggttgcgccagcggcgaaccgtagtaatggaaatccccagttcctgcgccagttcccggtcgcttttcgtcgattcctgaagatatttacgcgttctgggggtggtggtggcattagcgtgcagcttgatttccatacgatcctctaccggaaatataactaatcatatgagatatatattattgcagagaatacaatgtgaaccgcttcacctttcagcccaccgctttctctcataatccgccatagataacacacacagccctgtcgatcttgtacggagttcacaatgaacaatgttctgggatttcttgaagccaaactgatgcctctggcggcgaaaaccgcccagcagcgtcacctcggcgctattcgcggcgcctacgtttcattcatgccttttattattgtcggttccattctgctggtgatctcgtcgttccccaatcagagctaccagcagtttatggccagcaccttcggcgcgagctggagcgcaattatcgaaattccgttcaacgcggtattttccacaatgtcgctgtttatcagcttcctggtggcctaccgtctggcggagcactacggcgatgaccgcatctcctgcggcatcctctcgctggtggggtttctgatcctcacgccgttcattaaggtcgctgaaaacggcggcatcacggtgatccccgtggagtggatcggcaccaaaggtttattcgtcgccatgatcggttcgctgctgtggaccgaactcttctgctggctaaaacgcaaaaagctggtgattaagatgccggacggcgttccgcccgccgtgcaggagtctttcgccgcgctgatcccggcgctgctggtgatgattctgatcctggcgattcgcatcgggtttgcgcacacgcactacgccaccatccaccagtttatttatgaggtcgtcgcctcgccggtacgccattacggtacctcctacttcggcgcgctgatgaccgttttcagcattaccattctgtggtcggtcggcattaactccggttcgatgatcaacggcatcattcgtccgctgtggatggaaaatcagaccgacaacatcgccgctatccaggccggcgtcaccccgccgcacattatcaccgagcagttcttcgatatgatctggatgggcggcgcgggcgcaacgctgtcgctggtgatagcgatgctgattttcgcccgcagcaaaaatatgcgcgaagttgcccgcctcggcgccggtgcctccatttttaatatcaacgaacccatcctctttggcctgccggtgatcatgaacccgatcatgctgattccgtttaacctcgtgccgctggtgctggtcacggtgcagtacacggcgatgaagatcggcgcggtggccgtcaccaccggcgtctttatcccctggacgctgccgccggtgatcagcggttttatcgtcaccgggcatcttagcggcagcgtgatgcagatcctcaatttgctgattggcgccatgctgtacctgcccttcatgcgcatcgtcgataagcagtatcgcgcggcggaagtcaccgcccgtgctgaaacggacaacacgcttgcaaaacaggagtaaaccaatgtggggaatgattgccacctggcgaatggcgctggaaggcgttaccgaagccgcggcggcgctggcatccggcgctgataccgccagcgccgtggtcaatgcggtggcggcggtagaagattttccgctgtacaaatcggtgggctacggcggcctgccgacggaaaacggcgaggtcgaactggatgccgcctttatgcatggcgataccctggccttcggcgcggtcggtaatctggtggatattgccaacccggtgaaagtcgcccacgccctgagccgtcagcgctacaacagtctgctggtcggccagggcgccagagagtgggcaataagccagggattcgccgccaaagcgatgctgaccgaacgcgcgatgcagcattaccggaagcgctgtcgcgaaacgctggataaaggcctcagtccttacgacggccacgataccgtgggcattattggccttgataaacagggttccatgagcgttgccacctccaccagcggcctgtttatgaaaaaacgcggacggctgggcgattcgccgattatcggctccggtttctactgcgatagcgagaccggcgccgccacggcgaccggcgtcggtgaagatctgatgaaaggctgcaccagctacgaaatcgtccggcgaatggcccagggaatgacgccgcagcaggcggcggactcggtggtctgcgagctggaagacaaactgatgtcgcgctttggccgcgcgggcgacctttcggtggtgtgcatgaaccggcgcggcgaattcggcgccgccaccaatatcaaaaccttctcctttgtcgtcgccagcgcgacgcagccgctcaccgtgttctgcgccgagcgcgttcgggagaaaacccattaccggccggtggacgacgaatggatgcaggcctatgccgcacgcattcgcgcccccatcgaggagtaagccatgctggattatcgtctgattaatcaactggatagcgactgcaccggcgcgcatctggtgacctggcccggcagtacgctgctggcccaggccccgctcaatgccgttcccctgctcgcggaaatggtggaacaggccgcccgcggcgaggtggcggatacccgcttcggctgctcccccttcgcccgcatcaccctcattccgctccccctgtggagggatacgctgaacgatggcctggccgaggcgctgcggccgctatgcaaaaagccggtgagcgaaacgcttatcctcgacgcttcgctggaagagagcagcggcgcgttaaccaaagcgctgcgcgaactgtttaatctcgactggcagcttgatgatttgggcctgcatcaggtgaaagccgccaggccacgcctgcgccagctcgccctctacgccttacccgaacagcggtcggcgctggacaccctcgcccatcgtcaacgggccacggcgcacggcatgctcgccgcgcggcgtctggcggatctgcctgcggagcagtgtaccccgcagtacgtggtggaagaagcccggcgtctgtgcgcggatatccccacgctgcgctgcgaagttctggatgaaaaagcgatcgtcgaacaagggctcggcctgctgcatgcggtgggtaaaggcgctgaacgcccgccgcgcctgctggcgattcattatgatggcgtccgcgagggcccggttcgctgctacgtcggtaaaggcgtcacctttgataccggcggactgtggctcaaggaaggcgccgggatgtacaccatgaagtacgatatgtgcggcgcggccaacgtccttggcctgatgctgagcatcgccgagctggcgctaccggtgcgggcaatgggcgtactggcgctggcggaaaacgcgattggccccgccgccatgcagccgggcagcgtcgcccgggcctgtaatggcctgacggtagagatcaataataccgacgctgaaggccgtctggtgctttccgatgccattgcctgggcgagccagcggcatccgcaggcgcactatattattgatattgcgacccttaccggcgcggtggttaaggcgctgggttacgatttgagcggcttgatgacgcaaagcgacgcgctgcgggcggggttaacccgggcagggataaaaagcggggatgaggtctggtcgctgccgctggatagcaggctgaagaagcagaccgaaagcgcaatcgccgacctgtgcaatacgcccggcaataatgcggccatcagcgcctccgccgcctggcttttgcaccatttttgcccgccggagatcccctgggcccatctcgacgtcagcggcacggcgctgtggcgcgaaggcggtaaaagcgtcgcttccggccggccgattccgctactgattcagcatctgctcgacgatatcgacgagagttaacaccctccccggaggcgatgctgcgcatctgtccggactacgggttaccagcaatttgcggccctgtagcccggctaagcgcagcgcaagccgggaagaagccacagcaataccacgtcgcggcatattccccgggttgcggcgtaaacgccttacccgggctacggttaccagcaatctgcggccctgtagcccggctaagcgcagcgcaagccgggaagaagccacagcaataccacgtcgcggaatattccccgggttgcggcgtaaacgccttacccgggctacggttaccagcaatctgcggccctgtagcccggctaagcgcagcgcaagccgggaagaagccgcagcaatgccacgtcacggcatattccccgggttgcggcgtaaacgccttacccgggctacgggttaccagcaatctgcggccctgtagcccggctaagcgcagcgcaagccgggaagaagccgcagcaatgccacgtcacggcatattccccgggttgcggcgtaaacgccttacccgggctacgggttaccagcaatctgcggccttgtagcccggctaagcgcagcgcaagccgggaagaagccgcagcaatgccacgtcacggcatattccccgggttgcggcgtaaacgccttacccgggccacgggttaccagcaatctgcggcccggtagcccggctaagcgcagcgcaagccgggaagaagccacagcaataccacgtcacggcatattccccggggctatcggcaatctgcggtgctgcagccctactcctcactcacgacaggcttaactcttaccgcaaacagcactatcaccatggcgctgaccagcagcacgccgctgccgacaaaaacgccgctcgcgccgttgagatcgaataccgcaccgccgccagccgcaccggcgctaatcgccagctgaatagaggccaccagcaggccgcccgcgctttcagcttcatccggcaccgtggtggcaagccaggtcgaccagcccaccggcaccagaccaaaagcaaagccccacatcgccaccagcagaccgtccagcagcgcgacgtggccgaacgttaccatcatcagcgccagcacgctcattgccagcggcaccagcgccagcgtcaggcgcaggcttcgggccaacagatgtccggcaatcgaggtgccgataaagttcgctaccccaaaaccgagcaggatcagagaaaccccttcgacgctggcctgcgccacggtttcgaggaacggacgcagataggtaaagaaggcgaagtggccgctgaaaatcaggattgtcgcgagcatgccgccaatcatacctggccgacgcagcaccttaaacagggtagcgaagctgccgacgctctccggacgcatggaaggcagaacccacagctgccagagcagcgcaaccacgctcggcagcgcacagataagaaatacgttgcgccagccgatcagcgcgccgaaatagctgcccagcggcgcggcaaccaccgtcgcgatggaaacggcggaaaagataatcgccagcgctttcggcaccatcgccgccggaaccagacgcatggtggtcgcggtcgacatcgaccagaagccgccgatggcgattcccagcagcagacgccccagcagcaaaaactccagcgaaccggcgaaggccaccatcatgctggagataatttgcaaaacggagaaaaacatcagcacccagcggcggtcaatatttcgcgtcgcggtggtgatcagcagcccggtaactaacgccaccagcgccgtcgcggtcaccgcctgccccgccataccttcgctaacgcccaggcttgccgccatcggcgttaacaaactggcaggaagaaactcggcgacaatcaggccaaacacccccagcgccagcgcatagacggcgcgccacgcgggcctggcgttggtctggctctcttcagctgcaatgcaggaactcataaacatctctccagaacaattaacatttcgttaaggttaggcggttctgttcggacgatctatgatgcatactccttgattattgataattcgtccgggaatgatgttatgactcagcacgccctcgatctcaccagcgaacttctgcgcggcatgcgcctttccggcgtcaactaccgccgcatcgaaacctcccgtccttttggcgtcgaattcggcttcgtacctggtaaagcgcagttccactttatcagccggggaccggtactgctgcgcatggtcagcggtcagcgcctgatgctgcagagcggcgatgcgctgtttattccgaacggcgatggtcacgtgctgctctccgatgaccaggcaacggtggttaacgtgtccagactgcccagcgaaccggtttgcggctcggtaagctgcgtcaaaaacgcctgcgacgacgcgaaaagcgacagcgccattatcttcagcgcctgtatggactttgagctgggcggtatgcagccgctggtcaaagcgatgcccgaagtgatgctggtcagcagcctgctgaccagccgtccggagatcccgccgatgctggcggccatggaacgcgaaagcctcactcgacaggcgggctacgccggcattctggcgcggctggccgatgtggtcgccgcgctgattgtccgcggctgggtggagtgtggctgcggcaacgccaccggctgggtacaggtgctgcgcgatcctaagctggctaaagccatttacgttatgcatcagcagccgggcattaactggaaagtcgaggatctggcccgcgaggcgggaatttcacgttcggtatttgctgaacgcttcctctccgccaccggcaccacgcccgcccgctatctcaccgagctgcgtatgcgcctcgcggtgcagtacatttcccatgagggtcaggcgctggaaaaagtggccttcaggctggggtacagttctcatgccgccttcagccgcgcctttaaacgcattatcggaaaggcgccgggcgcgctgcgcgatctgtcgcgggaagaaggattttagcactgtcccagttcacgggtgcgcctgaccgccgccagtacgctgcgctgaagcccagcggcaaaatcgctgttgttcagctcatacagaccgtggatcccgacgcctgccggggagttgttgatatccagaagctggcgcggatgcttctggctttggcgcagcatctcgaccgcgccgagcaggttttcctgcaccacctccgttgcctggggccgcggcagccccgccagtacgccggcatcggtaagggactcaataaagtagtaaatatagttagggcccgcgacgccaaagccggtaaagatatcgatcaaccgctcaggcagatacagcactttgccaaagccgcgcagaaacggctcgatctcagccgcgctggcgtgggggtttaaggtcacgccgctatagccaaatccggtatcggtcagggtattggggatcgccctggcaatcggcgttgccgcaccaaacagggaggccagcttttccagggtcacccccgcgatcagagaaaccaccgtcgtcgagccgtttagctgcgggcgcacgcggttcgccacccccgccagatcgtcctgcggacggatccccagcaccagcaaagaggcctcgtttacgccaccgtcgcccgacagccgataacgggcgcgcagagcctcgactcgcgcgctgtcgatatcctccagcgagatcgcgtccgcccgcagcgcaccgtggcttaatgacgcgcgaataatcgcctccgccatctgtccggcgccaataaaatggaccctggtcatgagtcttactccttattcaaaaagatattcgccgttgccaacgcgaaagcgtcggcctttgagcgccgggtcagcaacgcgaaacaccagttcagtcagttggttcgccgcgccctcacggaaaagaaactctcgaccgcccaccgccagcccctgctcgccttgcggggcaaagccaaacagcagctgccagcggtcgcgcaccgcctgaggatgctgtaccgtgaaaaccgcgcgctgcagttcaatctcccccagaggatgcggcgcagcgagaccctgtgcctgcaggcggctcagccgggcgtcatcctcttccccccattgcagaatgaagggatagaccaggccgtcaaaatcgccgtcaatggtgaagatccgccagcggataacgttgccctgcggatcgtcgcgctggccgttgacgatcggcgaaacccgcaggccctgctcgtgcaactccgcatgcgtgcgctcaatatcgtcgctacgcagcgccacccgatacagcgcttcattatccggcagcagccgcgacgcatcccgggagagtaaaaacgtctccgcggcggaaagcagctctgcatcatcggcaatcgccagaaattcgatataggtcaggccgaaatagctcagcgcattcctggtcccccaacccgggtggcgcccaccggccaccgcgttgagcttttgcccgctcagcgcctgaatcgccgcttccggctgattaacaaactggaccgcgtggtcccacgttaaggttgccattcgccctcccgctcctctgcctgataaaaacgcagccgacaggcggcatcgccgcgagccagcgcggtctgcacctctaaatgcagccccggaaacgcgtcggttagcgcacgatcgccttccatgcagatatcgcacagcgtctcaatttcgctggcgcctcgcccctgctgccgccagcagttgacatagggacagtagtgaaacaggacgataaattcggcccggctggcgctaacgggctccatctcataaacctgagattccagtccgcgggtaaacagcccggcaaactcctgcaaatcttttcgatcgcgcatttgcgcgcgcagcttatgcccgatatcgcggccatagtggcgtattgcttcacggacagaatcatccgcgatatggcgttgtcggctttcgtccaacaggtaaccgatcgttgccgcgcgtttttcagtaatggcgcgcagcgccagggtcacctcatcgtttatggtggcggcgttatgcgccggttccgagcttatttgcgtcatgcgcttattcccagtcggtattcactttcacgtcgctggcgcccggcagggcatacacatcttcggcgtaccatttccgcgagagctcagcgagcgtgccgtcctttttcagggcaaccagctgcgcgtcaatcgctttgattagctgcggatcggtattttttttatacaaatagacgttaggaaacaggccgacggaatccgacgctttcagattaagatttagcgccttatttaacgccagcagcgcgccaatggggtaaatcgccgcatcgtattccccggaggctaccgctttaaagatatcggcggcggactgctcgccgttgggctgcaggttaatttgttggcctggatgttttttattgtagttttcaatcaccgtataacgggcgtcggaggtatgaatcggcaccagctttttcttcccgctggcgagatcgccgagattatgtatatcgttctcatcattacgcacaatcaggcgcaaatcgctgatcccggtcggctcgccggagtggtcgtatttttccgcccgctctttggtgagataaaagtgatccgccgcgagggtataggcgccggtcgataggccgacgatcatcgcatcgcgcgagaccgcattaaaatgaaacgtatagtcggttaaacgctggtccagcacctttaacaggtcgccatcgtaaccggtaatattgttgttatcgtcaacaaagctaaagggaaaaccgttagcattgacgacaacctcaaccgttttcgcgtttgcgcttttttcaacagcctgcgcggcgttcattcccattgccaacgccagcgcactcaccagtaaaattttatttttcaaaataccttccccaaaatgataaccgtgaaacactcttttctgcgtttccttgccagcgggcgctcagaaacctttctgcactgcgcaatgctctggcaatcgccaggcacagcacgatataaatcaccagcacgacgcagtaggcttcgacaaaatgaaacccgcgcgcggcggcgatattggctttcgccatcagatcaacaacggtgatggtgtaaaccagcgaggtgtctttaatcagatcgatcagcacgctggtaaagttcggcagcgcggataccgccgcctgtggaaaaataatgcgtcggaactgcgtgaatccgcttagcccgattgaccatgcggcctcgcgctgccccttatcaaccgcattccatcccgcgcgaaaggtttcggcgaaataagcgctgaagatcagcgacagcgcggtgaccgccgccgccagcggcgagagtttatagcggtacatcgtgtcctgcgggccgccgaacagcccggcggcaatccacggccagacgtaaaaaaagaaatacagcatcaccagggccgggaccgaacggccaaaggagaggaataccctcgccagccattgaacgccgggtacctgacgaataatcgcccacgccagcgctgcgcccagcaaagtggaaaacagtaaggataataacgttatcgtcagggtgaccggcagcgcgcttaaaataaacgtaaaattgtcgcgaatgaacgccaggctaaacatgttaatttatcactccagcaggaactgatatttcttttcaatacgagtggtaaaatagagaataatactattcagcacccagtagacgataataacgctaataaatgccgcgacttgtttcgccccgtagctattttgcgaaatcttttgtgcccgcccaaaaacatccacaataccaataatattgaccagcgaggtcattttcacgagattaattaaaagattgccaaagacgggaatagcaataataagcccctgggggaaaataatccgccgtattccatgatgccagggaatattcaggctgataatggcctctttctggccgctatccaccgcgcgccacgctgaacgcatcatttctgcaaagtagggactgatgctgaccgaaatagacagcaccgcaaaggtggtatcgctaatccacagcggcggcagcgccagcgcggtcaaaattaatttgccgccgaagaaaaaaagcaggataagcagcgccagaggcgcgccgcgcagaatgtcggtatacccatttgccgccgcgctgagcggcgtaaagcggctaaactgcagcagcacaatcagcagcgcgatcgttaaaccaagcagcagcgacgccagcgttataccgagggtcacgggtaaattttccagcagcttcggcactattccggcgatatcctgccagctaaacagcgggttattgttcatcatcagcctcaggcatgatagtgcagttgcgcaagaaacgcccgggttcggccctgctgcgccgcgccaaatatctgttccgccgggccctgttcaacgatttcgccgttttccataaataccacccgggaagcgacctgacgggcgaacgccatttcgtgggtcacgatgatcatcgtctggcccgcggcggcaatggtctgaataagctccagcacttcaccgactttttccggatccagggctgaggtcggctcatccagcagcagaacggcggggtcaatggccagcgcacgcgcaataccgatacgctgcttttggccgccggagagactgtgcggatagtggtcttttttatgcagcaaccccacctgctttaagagtcgttcagcaatagccagtgcctcctgccgcgggcgttttttagcgtatatcagtccttcggtaatattttgcagtgcggtgaggttatgaaaaagattccacgattgaaaaaccatagcggtttttgaccgtagtttttcaatctccttttttcccgcttttgcgcaatccagcgccacatcatctattcttatttgcccgctatcggcaggctctaagaaattaagcgtacgtaatagcgtggttttccccgagccgctggggccaataatgcaaataatctcgccggaatgaatgctgagagatacctcttttagcactctttcaccggagaagcttttactgatcttattgagcgttatcataatgagatattcgtgaataatgtttatttgccgcacatcggcatttattgctgtacaaaaactatattgccgctgttcagatgatagcaaacaagaaaatcatctatcgaaagtcaaaaaataactttttatatatttgttatgacaatgaggcttgattgtaatcaaaccttatttgcaaaacaggattgcggtaatcgatattttttattcaaatttactgaataatgatagcaaattgtttcgattttaatcatcgcgtcatcggcctattatttatcaaatcggggcaacaacgctccaatactgacaaaacgcttaaggaatacgaccatgaaatccatcaaaactttcgttgcagttgccgcactctctacgatctctttcggtacttttgcgcagagcatcagcgccagcgcttccacactggaccgtgcagaagccaaaattgccgctcaggccgcagagcaaggcgcgtcttacaaaatcaccagcgctcagttcaataaccgcgtgcatatgaccgcagaactgacgaaataaactcacccgtcatacttcaagttgcatgtgcgttggctgcgcgcgctcacccgaatcacttaccagagtaagcttatcgggattcactgacttgccgccttcctgcaacccgaattatttagggtatataacaacattgccgggccgccggaagacacaggcgacagcgacaacacgatgaaataaggaacaaaatatgaaaaatatcggcgtagtcaccgcactgctgttagccgctacactttcgtccggggcgatggccgcagagaatagctttgcgcgtccggaggcaggttcaaatatcgacacgtccgtgcatcagaatcatattgatgtcagccatgcctttgataaagagagcctgaccgcaggcaatcttcagtaacacacagcccagggcgcgcgcggaattatccgctgcgcgccctactttttctgccagtgtgcccacggattatccgctggcgcttccgcttttgccgtatcggtatcggacaacgaatcgatatacaacgcttccacttctttacgcgcccaaggcgtgcggcgtaaaaacttcaggctcgacttaatactcggctcgcttttaaagcagttgatgttgatgcgtttcgccagttcggcccagccatatcgcgcgaccagcgcgtttaacagcgcttccagcgtgatgccgtgcagaggatcgtttgggtgctgcattgcgtctctttacctgaattaaaaatttcgctcaccatactggctcccgacgccaatcgcaacagtcccgcctcccccttatccaaaattcgcaaaagcacagaaccctccacggtcataaattagaaaagaacgttattggttgattattttcgcttaaggcaagctggcttcaaccacccgactgaggaatcgatcatgcgctgttgttgtccccgaaccctgaatctgcatcgacgaaaacacctgaataccgccttcggagaacacaatgaacgcgacaaacttaccgatactggatctggcccgctacgcggaccccgctgaaaaagcggcgtttctcgccgacctgcgccacgccgcccgcgatatcggtttcttttatctgatcaaccacggcgtcgatgagtcgctgcagcaggccgtgcagcagcaatcccgcgccttttttgccctgcccgacgatcaaaagcagagggtggcaatgattcactctccgcattttcgcggctacaaccgcgccgcttctgaattaacccgcggtcaacccgactggcgcgagcagttcgatatcggcgccgagcgcccggccctgcagcttagcgaacgcgcgccgcgctggcagcgcctgcaggggccgaatctctggccagaggcgttgccctcgctcaaacccatattactgacctggcaacgggaaatgacccaggttgggatcaccctgctgcgcgccttcgccgaagcgctgcgcctgccgctggatgccttcgatggcctgtatggcgataagcccaatgaacatatcaagctgatccgctatcccggccagcaggagacccagagtgcccagggcgttggcgcgcataaggactccggcttcctcagcttcctgctgcaggatgagcagaaaggattgcaggtcgaagtctcccctgaccgctggattgacgcgaccccgctggcgggcagctttgtggtgaatatcggcgagctgctggagctggcaaccaacggctatctgcgggcaacggtgcaccgggtcgtttcgccgcctgccgaccagcagcggctgtcgatcgctttcttcctcggcgcccagctggatgccgtggtccccgtctacacgctgcccgacgagctggcccgcgaagccctcggaccggatagcgacccgcaaaacccgctgctgcgcgaggtgggctggaattacctgaaagggcgtctgcgttcgcatcctgatgtcgccgagcgctactaccaggatgtttttcgcgaacgcgccgagcaattgatcgtgtagaccctaaataattcgggttgcaggcaggcggcaagtcagtgaatcccaatgagcttactctggtaagtgattcgggtgagcgcgcgcagccaacgcgcatgcaatttgaagtatgacgggtataaacataacaacaatacaaggaataaaatgatgaaatatgccgcatttaaactggcaggggttgcactgtctctctctctggcatggagttccgcccaggccgccgcgctgcgcgtcgccgcggacccggtgccgcacgccgagatccttaactacattaagaagatcgatcccagcctcgacctgaaaatcgtcgaactcaccagcggcgttaacgccaacgaactgctggccaacggcgatgtcgatgccaactacttccagcacgtcccctatctgaaagatcaggagaaagcgctgggcaaaaccttcgccgtcgctgcgaccgtccatattgagccgctggggatctattcgcgcaagcataaagattttaaatcgctgcccgagaacgccaccgtggcggtaccgaataacaccactaacctgagccgcgcgctgttcctgctgcaaaatcagggtttgattaagctggcggcaaaatttaccgacccggcgacaaccctggcgacgccgaaagatatcgtggaaaacccgaagcacctgaaaatccttgagattgaatcaccgcagatcccgcggtcgctggatgacgttgacctggcggtgataaacggcaactacgcgctggaagccgggctggtgccggccaaagacgcgctgggtctggagagcgcgaccaacaacccgtacgccaacattctggtgacaacgccgacgctggcgaacgatccgcgcatcaaggcgctggccaaagacctcacctcgccgcaggtcgccgaatttattcgtaagcagtataacggctcggtgatcccggttgctcctcagtcatgattgagattgtcgggctgagtaaaacctatgccggaacaggccgaccggcgctaaacgatgtctctctgcaggtgccgagaggagccgtttacggcatcctcggccgcagcggtgcaggcaaaagtacgctgatacgctgcctgaatctgctggagcggcccacgtcgggccgcattattgtgaacgggaacgatattacccggatggataaaaccgcgctgcgcgagtaccggctgcgtaccggcatgatcttccagcactttaatttacttcacgcccgcagcgtcgccgacaatgtcgcggtgccgctggagatagccaaagtgccgaaagccgcccgccaggcgcgggtggcggagctgctggaactggtcgggctggcggataaagccgccgcctttccgtcacagctttccggcgggcaaaaacagcgcgtggggatcgcccgcgcgctggccgcgcggccggatgtgctgctgtgcgatgaggccaccagcgccctcgaccccgagaccacggcctcggtgctcagcctgctggcggatatcaaccaaaagctgaacctcaccatcgtgctgatcacccatgagctggaagtggtgaaaaccctctgcgaccacgcggcgctgctggagcacggggagattattgaaagcggcagaattgccgatttgctggtggcgccatggtcgcggctacggcagtcgctgctgcacgatcctcaggctgagcgggatttcctcgctcgccacggttttcacgggaggccattatgcggagtagcatgagttgggaagatctctggccgctgctgcttcagggcacggtagataccgtttatatggtcggcctggcggcgctgtttaccgtgctgctcgggctgccgaccggcgtgctgctgtttgtttcacgccgcaacggcctggcgccgatgccgaagctcaacgccgtgctgggcgcgattatcaactttggtcgttcgctgccgtttatcgtgctgctgatcgcgctgatcccattcacccggctgattattggcaccaccctcggcagtaccgccgcggtggttccggtcaccattggcgcctttccgttctttgcgcggctgacggagaacgcgctggatgaagtggattacgggcgtatcgaagcgattttatcgatgggcggtaatatctggcacgtgatctttaaatcgctgctgccggaagcgctgccaacgctggtggcaggcatcacgctgaccatcgttatgctgatcggcttctcttcgatggcgggcgtgattggcggcggcggactgggcgatctggctattcgctacggctatcagcgcttcaataacgaggtgatgttcggtaccgtgctcattctggtcgcgctggtgcagggcgtgcagatggccggcgaccgtctggtccgcggcctcgcccaccgtcgttaacaataagcgggtggccgcgcgccatccgcgattaaaacccgctttcgcgcaccagggtgcgtatcagttccgctgccggcagctcgcgaatcaggctcactccctgcccggcccagtgcgcaccgtactgacgatctccctgcgctttcgccgccgatgccagcgcctttccggcgtcgtaagccacgggataagccggaatcagcggcggatcgtttatttcacgccagccgttaaccagacatctcgccgggcgtccggaaatggctgaggttaaaaccgtttgcccgtcagacgcgcttttaagggcctcacggtatccgccatccgtggacgattcagggcacagcagaaacgccgtccctagctgcgccccgtctgcgcccaggttcattacgctgttaattcccgcgccgtccatcacgccgccagcggcgataagcggaatatcggtatgccgtcttatcgtctgaaccagagtaaaggtgctcatctgcccgtcgggcgccagcggatcaaagatgccgcgatggccgccggcctcgtagccctgcgccaccaccatatcgatgccctgctctacggccagcaaagcctctgccacgctggtcgcgctcgccagagtgacgatccccttttcccgcagtcggcgaagggtttcacgatccggcacgccaaaatgaaagctcaccgccgccggagtcaggtcgagcagcagctcggccatccgcggctgctgctgaaaactcagataaatttccgccagcgtctccggcggcaagctgccaaagcgcgcaaattccgggcgcagccgcgccagccaccgggcttcacgctgcggatcccttaccgccggggcgtggcaaaacagattgacgttaaacggacgggtggttaagcgccgggtccggttaatcagcgtttcagcctgctctacggttgacgagcccagccccagcgagccgagcgcgccggccccgctgaccgctgccgccagttccggcgtcgacacgccggccatcggcgcctgaataatggggtaatcaatatcaagctgctgcgtaagcctgttgctcatggtttgccctgtttaaatttgtgcgttcgggccattaaaatctcttttagagatgataagatcaacattattttcaaattaagaataaaaatatgaaccacaccacattagagatatttaaaacggtggcgcaagagcgcagcgtcacccgcgcggcaaagcggctggggcgagcccagtccaatatcaccacccgcattcaccagctggaagaggagctgggcgtggagctgtttgcccgcggcaataaaaggatgctgctgtcccccgccggtgaacattttttgggctacgcgctgaaaatcctcagcctggccgaagaggccagacaggcgctgcatccggcgacgccgggcggcaatttacgcatgggggcgatggacgccaccgccgccagccgcctgccgccgctgcttccccggtttcgcgcgctgtgcccggaggtgacgctcaccctcaaaacccagcccacccgtcagctgacccaacaggtgctggacgccgcgctggattgcgcgctggtgagcctgccgcagggaacgcctccgcccgatgacctggagtacgtatccatctttaaagaacagctgctgctggtgcttcctgccaatccacagcgctttcgctttgccgcctttgcgcagggctgtacctaccgggcgatgggcgaagcgtttctggcgcaatcagaggaggtggagagcgagatccaggacgtcggctcctatcacgcgatgctcgcctgcgtcgcctccggcggctatgccggtatcgtgccgcagagcgtgctcgataccctgacgctgcccgaagccagccagctgcggccggttggccaggcgatcacccagcttatctggcgcaaaggctacgcgtcccccgctctcgagaaaatgcgccagcttctggagtcagcctccgacctttgacgctcgccccgcccctgccgccaccagcgcggcggcagccagcagcgcaatggcggccgcgctcagcgaaggattaaacgacccgctgcggtcatacagcgttccggcaaccagcgggccgacgatttgcccgatgccgtaggtcgcggtcatggcggcaatcatattgaacgtaaccagatgattaagccgccgcccctcggacagcgcgatggtcacggtgcccaaaaaggtgcaacccaccagcagcgcgcttaatatgcaaaacggtaacgcatggctccacgccgggagaatgacaccgattgcctgaatcagcaaattaagggtaaacgcgaggcggtagccgagcttgatcaccagccggtgccagataaagcaggagggaacggcggcgaggccgaaaatagcccagatctgcaccggatcgataacgttcagcgaaccgctgagaaacagcggaagataggtggcggtaataatgtagccgaagccggccaggccataaatcagcagcagtttccacgcctcccgcacccgcccctcgccctcctcgcggtgtgcggtcgcggcgggttgataagcgataaggtagtcggcggggctcagcagcagacgcagcgcgagaacaaaaagcacgccagagcttatcgcacatatcagccatatctgctggctggagagcgccagcgccttccccagggagataaattccgccgacaagaatatccccattccgacgccagaaaaaagcaccggcgcgccgttagggtgcttcatatgctgcagtagccagagggaggcggcgatcagcgtcaccgcgctgagtaatccggcaattccgcgcaccacaataatcgccaggggggaaaccaggaacgccagtaaggccaggcacaccagcgtcaacagtgcggaaagcaggcttagccacctggcgtccgcgggcctggctttcgccagcagcagcgcgccggccagatagccggcatagttcgccgaagcggcaagattaccttcacgcagcgtcagcagctgctcattgagcatcagcggcaggatcccggtataggcaaatcggccatagcccatgccaacgatcagcacgaccgaaccggccagcgccagcagaaaggccttccattccggcctggttgcaaaaacgttcacccacacccctccattattattctcaaataaagaatcataaataacaatcattctttatttattgtgatttcgcttgccacgatgcgcaagcagcgccatgcggcagcgcccggcctgcggggagaaactttacggcaacggccgggggatgcttcggcgagtaacgaaatgtggagtgaggcgctggacatccttgtccagagggatttaacggtggctaaaagccagtttggcagcaaataacataaagaggccgccggttgcgcggtccatccaccgaataaatagcggcgtctttaatagccgagcggcagagcggctggtcaggattagcgttaacgaccagagcgtcccgatcgccacgtggatggcgaccagcaggaacgtccagacgatgggcgagtggccggtcggaataaactgcggcaggaaagagacgtaaaagatccccattttcggattgagcacattgcccatcatcccttttaaaaaccagttacttgccggcgccgccgccctgtcctgatgaacaaaatgaccgcgcggcttgagaattaactgaatgcccagccagcataaataggcggccccgcaccatttgagcaggtcatacgccagctccgatgccgccagcagcgccccaagaccgaaggcgaccgccgccccccagataaaacatcccgtatcaatacccagtgccgcctgaaaggctttttttccgccttcaacggtagcggttcgcagaattaaagcggtatccaggcctggggtaagggtgagcaacagcgcagcaaaagagtaagcaagaagggaatctgcaacggacattttctctctccgaaagcgaagattctagataaaacccgccgcagagacaatcgaataaattcgctttgccgggcgcgttaaaagctctttgtgacaaatggccgccgcaaaagcggatacagtcaatcgaccaaacctttattgatacaggctgttatgacgcttaacgctatccgcatcgccaggccggtcaccgacctttcactcagtagccacatgtactgcactggccttgggctggagcaaatcgcgcagtttgccgatcatgacggctttagcggcgtgatggtcggacgccgcgatctcggctggcatcttgaattcaccctctgccattatcatccggtgaagccctctccgggcgaggaagatttgctggtgctttattacccggaagccgcggaatggcgggaacagtgtgcgaaaatgctgaccgccggttttgcgccggtcagcgcgttcaatccgtactggaatgtgaacggtaaaacctttgtcgacggcgacggttatcgcgtggtgctgcagaacagaagctggccgtaggcgctactccataagccggacgtcaggatggcgcgggcttgccgcttcgtgaaaaatatcgcccagccagccgggaatttccgcctccgggagatcgtccgggatgatgatctcacgcagcggcgagcatttacgctcgttcagatcgacgcggaagagtagccagcgttcgccctggcgctggacgccaatatggcgcccgaatacgtcataaatcagcattccatcaccctgccgatcgcaggggatgatgggcggctcatgcatgccattatgctttgccctcgcgcagccacggggtcacggtaatccctgtcagcagcccttccgggctcagcagccgcgtgacggtttgcccccacggctcaatgcggttgtccaccagcagacgatagcctctggccttcagcgcgtcggtggcggtgttgatatcgcgcacttcaaactcgacccacgcctgcggcaccggcagatagtcaggccagagatcggcgtcaaagcaggagcgcgccgcctgcgccagcggccacagggcaaaatgttttaccccgccgatggcgtcatgttcggtcagcagatactcttcgttaccgggcatcggttttagcggcaggcccagcgcagccacataaaactccctgctggccggcgtcgattgcgttatcggcccaaagccggcgacaaaaagcacatccataccgtctaaatcgtattccatactctctcctgtcattatccgtgatgcgttaacagattttatactctgccgcgcacgactttcccagaatcctcttttctcatgactatttttagtgcgtttgcctgaatcattgagaaaacgcatgctctgctcgttgcggctgacggcgctgcgctatgcttagcttccctttggtttgcaatacttcgcgttatgaccacttccgccagcaccactcagcttaatctgcgtattatttctatcgttgtttttacctgtatctgctatctctctattggcctgccgctcgccgtactgccgggctatatccactatcagctgggctataacccctttatcgccggcgtggtcatcagccttcagtacatctcaaccctgatcagccgcccgcatgcgggccgctacaccgacatctgggggccgaaaaaagtcgtcagtcgggggattgtttgctgcctgctcagcggtctcttcacgctgctcgcggtcttgctgcaatcctcgccgccgctagccgttgccgcgctgttggtggggcgcattttcctcggcgtcggggaaagttttaccgccaccggcgcgaccctgtgggggatcaaaaccgtcggtgcgattcacacttcacgggtgatctcgtggaacggcgtggcgacctacgtcgccatggcggtcggcgccccgctgggtgtcatgcttaacggctattttggcatcagcggatttgccgccgtggtgatcctggcggcggcggttggcctgctctatgcccgtacgcggcaggacgtcagcgtgacggcggggatcagagcgccgtttcatgtggtggcgcgcaaaatctggccctacgggctggggctggcgctgggtaccgtcggttttggggttatcgcaacctttattaccctctacttctccgcccatagctggcaaggcgcggcgtttaccctctccctgttcagcatcggttttatctgcatccgcctgatcctgggcaacaccattacccgctacggcggcgtgccggtatcgttaatctgttttgcgatcgaatgtatcggcctgctgatcatctggtcggcctcctcggcgtggatggccggaatgggcgcctttctcaccggctcgggcttttcgctggtcttcccggcgcttggcgtggaagcggtgaaacaggttgaagaacagaatcagggcaccgcgctgggcacctattcggcctttctcgatctggcgttgggattaaccggcccggtcgccggctgggtggccggttattacgatctggagactatttatttgttggcggcggcggtggtcgcgctggcatttatcttgattttgcgcatttacctgcaacaacgcgctgctttaccgcgaacctgaggaagcatcgtcgaaagataaccggcgcaaatatgggtaaaaaattaatcaataattgacggcaattcggcttccgtgccaccatcgcttcagcgtccggcaagcggcgcgatggtggtacgggtgaatatcagagaccgcatgtttaaggtccatgcccgtccgcaacctgattctggcgggaataaagacatgcaccaaagttttaatcagcgcgttcatttctattactgcattctggtggcgctgaaaatacacgcaaaatcgaagaaatcaggcggtatccgcgggaaaaataatttcctgctcaagtggctgcgtaaagcgcaggacaacaatatattccacccggatattaccagcgagatcgaatggctgcgcggcaaaatcattcaggccggctacgataccgaccttgaacccatgctcgattttgtctatgccaccgccaaacgcgcggaagatcttaagaacgccgactgattcacgcccgagccgcctggcccgggcgttgtactttagcgtttgttacggtgcgtcaggagatagactgccgggatcaccagcatcgagagcagcggcgcggtgatcatcccgccgatcatcggcgcggcgatacgctgcatcacctccgaaccggtgccccctccccacataatcggcagcagtccggccatgattgtcgccacggtcatcactttcgggcgcacgcgcagcacggccccttcatgaatcgcctcgttgagcgcgcgatcgttcagctcggagcggcgtttcgcgatcgcctggttcaaatagagtaccataatcaccccgaactccgccgccacgccggcaagcgcaataaagcccacggcggcggctaccgacaggttgtagcccagcagccagagcagccagacgccgccgatcagcgaaaacggtaaagttcccataatcagcagagcgtctttaacgcggctgaaagtgacgtaaagcaggataaagataatcatcagggtaaacggcagcacgattttcagcttcgcggtggcgcgctcgaggtactcatactgcccggaccaggtcagcgagatgccttccggcagcctgacccgtttgccgacctcgctctgcatttcatcaactgcggattttaagtcgcgcccgcgaatatccacgtagatccagtccgacaggcgggcgttttcgcttttcagcatcggcgggccgtcggtaatggtgatgtccgccagttccgagagcgcgacctgcgccccgccgctggtcactaccggcagatcgcgcagcttttgcagcgagtcgcgcatttcgcgcgggtagcggacgccgatcgggtaacgttctcgcccctcgatggtttcgccgatgttatcgccgccgacgacgctggcgacgattgactgcagctccttcaccgacacgccgtagcgggcggctttcacccggtcgatagcgatatcgatatagcggccgccgtcgaggcgttccgccagcgccgacgtcacccccggtacgctacgcacgatgcgctcaatctcttcggcggtcttttcgatctccgccagattgttaccgttcactttgatgccgaccgggcttttgatgccggtcgccagcatgtccaggcgattacggatcggcggtacccagacgttggctatccccggtaccttcaccgtattgtcgagctcctcgatcagcttatccatggtcatgccgggccgccattcgcttttcggcttgaactgaatcgtggtttccagcatggtcagcggcgccgggtcggtagcgctgtccgcccgcccggccttgccgaatacgctttgcacttcaggaatggtcttgatcagacggtcagtctgctgcagcaagcgtccggcttcgcggctggagatccccggcagcgtggagggcatatacaacaggtcaccctcgtcaatttgcggcagaaattcgctgccgagctgcgccagcggccacagcgtggcaaccagcagcaggcccgccgccgccagcgtcgccttcggccactgcaaaactttatccagcagcggctcataggcgcgaatcagccagcggttgagcggattggcggtttcatcaggaattttgccgcgaataaagtagcccatcagcaccggcaccagggtgatcccgagtccggcggccaccgccatcgaatacgttttggtgaaggccagcggcgagaacatcttgccctcctgcgcttcgagggtgaacaccggaataaacgacagggtgataatcagcaggctgcaaaacagcgccggccccacttccgacgccgcgtgctgggctatctgccagtagtcggcggaggacggctggcgttcagggtgctcgtgccgccactgctccagaaccttatgcatattttctatcatcacgattgccgcatcgaccatggccccgatggcgatcgcaatcccgccgagcgacatcatattggcgctgacgccctgatagtgcatcacaataaacgcgccaaggatccccagcggcagcgtgatcatcgccaccagcgcgctgcggaagtggaacagaaacagcgagcagaccaccgccacgacgataaactcctcaatgagcttatgggtcagggtctcgacggagtttttaatcagctgcgaacgatcgtagaccggaacaatctccacgcctgcgggcaggcttttttgcacttccgccagtttggcctttaccgcgttaatggtgctgagcgcgtttttacccgagcgcataatgattatcccgcccgccacctcgccctggccgttgagctcggcgacgccgcgccggatcgccggtccccggcgcacgctggcgacgtcggagagcagcaccggcacgccgctgcgcgcagcgataaccacctggttaaagtcgtcgatggacttcaggtagccggtggtgcgcaccatatattcggcttcgcccagctcgagcaccgaaccgcccccttcctggttggcgctctggatcgcgctaatcacctgctcgtgggtgacgttcagcgcccgcagccggtcaggattaaggatcacctgatactctttgaccattccgccgacgctggccacctccgaaacatccggcacggttttcagttcatatttgaggatccagtcctgaatcgcccgcaggtcgccgaggctatgctggccgcttttgtcggtaagcacatattcaaacacccagccgacgccggtggcatccggccccagcgacgctttcgcttccggcggcaggctgctctggacctggctcaggtactccagcacgcgggagcgcgcccagtatgggtccgttccatcatcaaacaggacatagacataagcatcgccgaacatcgaaaagccgcgcacggttttcgctcccggcaccgacagcatggtggtggtcagcgggtaggtcacctgatcttcgacaatctgcggcgctttccccggatagctcacgcgaatgatcacctgggtatcggagagatccggcagcgcgtccagcggcgcctgctgtaccgaccagacgccccaggcggccataatcagcgtcgccagcaataccagcaggcggttgcgcaatgaccagcggataacggcggcaatcatggctgctccttagcgccgttcagcggcatcattgaggtgactcgcgccccttcatcggtcaggacgaagtgaaacatcaccgactcgccgggccgcatctgttcccgcagctgcggcgtaatagcaaaatccatgatcatcgccggccatttcagcgccggtaccggctggtgcgcaatggttaccgcctcatcgttcacggccttaataacgccctgcgctgagtagctttttgcctcctcttcttgcccggccatttgcggcagcgcgctgcgcaggctggcttcggagtcaatcaggaactgcccggaggtcaccaccttttggcccgcttcgaggccggatttaatctcaaccagaccattctgcgttcgccctgcggtcacctcgaccggacggaaatgcccctcgccgtcggcgatcagcacccgattgctggtgccggtggcaattaatgcctcttccggaatagccagaacggcgctctcctgctgcgcctcagccagctcaacgttcaaatacatgcccggtttgagccgatgctgcggattattcagcactacgcgggctttcaacgtacgggtggtggcttcgaggtcgggaagcagttcgctgacggttccctgaaacgccataccgggccagctgccggtggtggccgtcaccttactgccttcgcgcagcaggctggcctggctttgcgggtaatcaatcacgatccagaccggatcgaggctggccagctcgaacagcggttgggctgtcgtgacctgcgcgccggtgcgcacatccagcttgctgacgtagccatcgtgcggcgcgcgcaccgtcatgcgggtttgcggttgaccgctgcgctcaacgctacggataaccgcttccggcataaactgcagccgcaggcggtcgcgggccgcggcggtcagctcgctatcgcccagccgcctcaccgccagatactcctgctgcgccgccgcccactgcgggatccacagctccgccagcggctcgttctttttcacaaactgctgggaggcgttgacgtaaagtttctcaatcagaccgctggccagcgccggtaccgtttcaacgccccgctcatcaatggccacggtagcaaaagcattgagcttcatcgccagcgtctggcgggagacgttcgccgtacggacgccaaggttttgctgctggcgggcgctaatctgcacgcccccggcgtcttctcccgcgccttcatcggcgtaacgcggcaccagatccatatccataaacggcgatttacccggtttatcaaagcgcgtagcgggggccattggatcgtaccagtacagcactttgcggcccgtttccgcctggccgccgccagcggaggacatcggcgcgcttcgcgaacccagccagtagccgcccgcggcggcaagggcgacggccagcgccacaagggtaagagcagatttaagcttcattatttaacatcctgtggaataaggtagcgaatagcggcccacgcatcggcaagcgctttctccgcattgttgctggcaatttctccgctcaggagatcgcgacgggcggcgagcagctcaggcagcgcggagctgccgccccgatactgggcattgacgagactcaccttcttgcgcagcagcggcatcacctcgctttgctggcgatcgtaaatggctttcgcggcgttatattgcgaaatcagctgatactgctgcgcctgatgttcgcgcatcaataacgtcagccgatcgttggcttcataggtacgggagacgtccgctgcgtggtctttgtcctgacgtttgccctgaaaaataggcatatcgacggtaaacatgacccccaccatgtcgtcataatcatcaccgcgtcgggcgtaataaacctcaacgcccacgtcggggatcgccgcgacttccgactgacctgatttcgctttcgccagatcggcttctctggcggccaggatcacttccgggtgaagtttaatcccggccattaggtcggcttcgtcggcaggcagacgttcaatgcgcggcagcgggccggagatatcgcggacctccttcccggtgagctgcagcaggcgcgcctgggcgatctggacatcgcggcgggcgttatcctgctcatttttcatcgcattcagcgccagctgaacgtccagcacgctgctgggactggcgctggcgctgctgacgccggccttttgtacgtcgatttgccgggacgtttcgctaatcaacgtctgcaccgagcgcagcgacttctgcgccaccgccagcgccagccacgcctgggcggtttcccgctgcagccgggcacgaatcacatcggcattagcggcggtctggcgcgcctcggcggtaatggagtcggctttccgttcacgcttggtactgctgacgtagtcctgcatcacgccaactctttgcatggtcatcccctcgcgggtgaggcggccggcgttattgccgcccagcgggacgttttcaataccaaatttcagcttcggatcggggagctgcatcgcggaatccgccatattcttcaaagcgttaacctgatgatcgttggcggagagctcggcggagtagttttccgccgccgacagggcctcagaaagcgtcgttgcccagccgttggtggacatcagcgacagtaaaagcggcagcccgcaggccgccttattgaagatgtgcataatgactccgaaattatcgcgcggtaattgaaacgatcgcgtagccggagtcggtctggcggaaggtgaaatcgacctgctctcccaccgccagctttttatcgtggttatcagcgagcgcaaagctcatggtcatcgccggccagttcagctcggtaaccggagagtgggcaatcacgacggcatcgtcgcgccaggctttaatgaccccgctggccgaataaagcgtggcggaatcatccgccttcttcatctccggcatatccgccatggaggacatggtgtgatggtgcatcgcggcgtcttccgcgctggcggtaaatgcgctgaaggaaaaggtcagcacgctggtaataagcagaaaaatagaggtcgaacgcataataaagtctccgaaaaaaacataaagtcgcccgcagaccgggcagatctgatggatgtttttaacggtgcgttattccctgaaacggcagaagcgtatctcaaccgggggaccggtgaccggcggcgtgcgccagtccatacgttcagcgcaggtctcctgctgcggggaaaccacgagtagcgcggtttcggaggggagcgcgttcagctgtagagaggttaaggagttaggctgcgcggtatcggggtcgcagtgcttctcacagataactttctggccgacgttttccatgccgggcatgttcatcatgccatcgacaatatggtgaatctgcacctgcggcgccgcgggctgctgctggccgccatggtgcgccgcgacggcgagctgaaggttgagcagtaaccaacaggcaataacaagccctgcgcggatacgaagccggcgccgggttgcttgtttaaataatgcctgtagtgactgaatcatagtgatattcgcaattagacgaccgctggattaaatcacactcactgcaagaattaaacgatatttcaaagagaaaactccaggttaaatagaatgaagtttctctataaatatttacaccaaaaagggatatcagtatttgaccttccccttaggggaaggtgtatagccggcggataatgtatttaataaatagcaaaaatgttatttatatgtaattagcaaaagtgaacgcgattattattccagcaccaacgtatcgccggttgccggcgcgctactctccgctagccaccagcgcccccatgaaccggtgcagtggcaggccatcacctcctcgaccttctgctggcgcaagaattgtctaagctgacgaattgcccacggcggcgcgctgcgcagatgaagaccgccgatgatggcgtatacctgctggatgccggtgatcttctggcagtggcgaacggtattgatcaatccgcgatgtccgcagccgcagataatgactaaccctcgcgtcgagcggcagatcaggacgccttcatcgacaatatagtcctcaccctgggattgacccgtcaggaggccataggcacgcgggtgagcgaccgtaatctcaccggaccacagcagtcgttcgccgatcgccaccggctcgcggctgtactccatgcggtggcgggagtagtcgatatctcgcgacagctttttgactttccagttgcgtcctgcgagagataacgccgagtagcgggtgagtccaatctgcggatgacaaataatacggctgttgtccggcagccacggcaccccgccgcagtgatcgtaatgtccgtgggagagcaccgtggcggtcaggtcagataaagagacgcccatacgctgcgcattatgaagaaacgtgccgtctggcccggtatcaaacagcacccggctggtttcatcctccacaagcaggcttaatccgggtttcgcctgcagcaggctgtcctgccccttgccaagccggttttcgagtaacaccttaatgattaacgccatttaatgaccatcccccctggtttacgacgcctactgtagccaaccgctggcggggatgccgtgatgaaccctgcataaggaaaagtgacggcgtcacaataaagtaacatattgattctgtttagttgccagataagcattgccgtctatgctgatgaacgagtttctcttaaccggagcgcgctatggcagactggaatccttcactttatttgcaattcggcgctgagcgtacgcggcccgccgccgagcttctcgcccgcatcgcccaccgtcccgccacgctggccgttgatctgggctgcggacctggcaacagtaccgctctgctgcgcgatgcctggccagatgccacgattatcggcgttgataattctccggccatgctggaagaggcctcccggcggctaccggactgccggttcgtcgaggcggatatcactacctttcgccccgagcggccggcggacgtgatttatgccaatgcttcgctgcagtggctcacggatcatcagcgccttttcccatatctggtcagcaatcttgcgaaaaacggcgtactggcggtgcaaatgccggtgaactggcaagagccctcgcacgcgctgatgcgtcaggttgctgaagagatggggcatccggccagtgggcggcagccgctgccggatgtgtcggagtattacgatatgctgaccaccagcggctgcgaggtagatatctggcgcaccacctaccatcacccgctggcatcgcaccaggccattattgaatggctacagtcaacgggcctgcgaccgtttttacaaccgcttgatgaacagcagcgccaggcgtttctagaacgctatctggagcggctgaaacagcactatccgttacagtgtaacggaaaggtgctactgcgatttccgcgcctgtttatcgtcgcgcgccgctagcgccatcggagtgtaaaaagagggagagaacgctacggcgcaggaagcaggcgccgtaggccaggtttaccaggacagatgatggaccagagagagatcccatgcggtggccagcagcgaaagaaacatgatgaggttcacaaccgtctctatgcgtttttccattttgttactcctgagtcgtttcccctgttttacaggggaaatcttaataacttcttaatctcagattttcagagcgtcacgcggtaacgaacatagtcatcggcgggcgtaaactcatcatacagacgccgggccggattatcagtacgagtgtgccagtacagccgcgaccaccctttctctttcccttccgcttgcagcgcctgcatcaacgccctggcgatgccttttccgcgcatcggcggggcaacaaacagatcttccagatagcaaacaggcgtctttacccaggtaccttcgtgaaggacacaaatcgcaaatccagcgacgttgccatccgccagggcaacccggcccagcatgggagaagcggaaacaagcatccgctgccaggtatattccgtgacgtcggacggctgcgggctaccgtagaaacgggtatagccttcccatagctgtagccactgcgctttgtcctgctggctcacttcacgaatttcaatgaccatgggtctcatccctcgtttggataagccattattttccagtcagataattagttcaaccgccgggggcacaattcatctttttctcttaattacccctgtttccactgccggacgaaatgggcacaatctttcagacctgcgtttataaaaaaacacagaagtatgttgtaactaatgcgaatgccaaactaacccggcagctgccgggttgagattaatgctccatcgctttagcaatgtgcccggatgagtaccgggcggcggcttacgccttacccggccgacacgatcgacgctattcaggtcgtccgtcagcgggcttcagagtatcagcataatggcttaacggcggcgcgcatgccgtcgcgcagaatagcatccagatcctgcgtgacccgatcgaccagacccggcactttcgtcaggtcctgctcccagtgggattcaacggacagtacggcttttaccagctcaccggtagtgatttgcgcatcccgatgctgggcccatagcgccttatagctctccatccattcggcatcatcctgaaccggatagttctcaccgttacgctcgccgcgataaaaggcgatcagcgccgccagcgcaaaggtcaggcgcgtcgggagagccccctctttcttctggcccgccagcagctgcggcagaatgcgggtacgatatttagtcatgccgtttagcgcgatagacagcagctgatgcttgatgtacgggttacggaaacgaccggttaccgcgctggcgaaggacgccagctcatcgcgcggcagatcgagaaccggaataatctcctgataaatcgccttctcgacgaatgagcagatttccgcatcgttcatcgcttcgcccaccgtatccaggcctgcctggaaggcgaccggcaccagcgcggtgtgcgcgccgttaagaatggccactttacgctctttgtacggtttaatatcgtcaacaatcagcacattaagcggtagcttatcgaggcgcagctcggcggccagggatttcggcccctgaatgacaaacaggtagaaatgttcggcggtatcgaggaaaccgtctttataccccagctgctcttcaatctgcgcggcttcatcgcgcggatagccggtcacaatacggtctaccagggtggagcaaaaagcgttggcttcatccagccatgccacaaacgcttccggcagcgcccactcctgcgcatagcgcagtaccagttcccgcagcgcttcaccgttataatcaatcagctcgcagggaacgatgacccagcctttatccgccgcgccggagaaatggctgtagcgttcaaacagcaggcgggtcagttttgccggatagctcaccgcaggcgcatcctcgaagcggtcccccgcgtggtagctaatacccgcttcggtggtattggaaaacacaaaccgcatatccgggttgtgcgccagccgcagcagttcatcgtaatccgcataggcgctgatttcgcggtttaccgagcgaatcagacgcgcatcgctgaccgcttcccctttctcgttcaggccacgaataatcgtggtgtagaggccatcctgggtgctgagcgacggcgggaatgagctctcaatcggacgcacgatcaccaccccggcattcaggtcggtatgctcgttcagcagatcgatctgccagtcgataaacgcgcgcaggaagttaccttcgccaaactgaatgatacgttcagggtactgcgcgcccgggaaatcgcgacggtttagtgttttcacaagggttccctcatagagtagtcatacaacctgagtaattggtccaataagttatcaggtttttacgcaagtgaaaccctgttttgatcaaagctgtatgcaatataaaatttatgacagaaatttatagaacagcgatgttgccgtcagctcgccgtcgggcatcagcgcatagcgtggaatttccccggctttttcccaaccacactgtacataaaagttttctgctccgctgcccgtcgccgtatccagcaccagaacgctcttaccctgctcgcgcgcgatggcttccagccgggacatgagcgcattcgccagcccctgacgccgcgcattttggtgaaccagaagtttggcgacatcggcgcggtgcggctggttttccggctggtcggtaatcagctgtaccgtaccaacaagccgctgctgcgcatccgctgcggcgagaacaatgcgctcaccggcggcgacgctctgcgccattcgcagccagaacgccgtcgcggtttccggggaaaaaggcagcataaagctcaccgaggccccgccgttgacgcagctgacgaggatgtcggttaattcaggaaggtgttcaagaatatcgtcacgcgacagcgtgcgcagagaaaaggatgtggtcataggtaactccttgaaattgaccacatcactatgtttttaacttatatttaacacaagcggaattaccatcgtcttttcttatgtacgattcagaccatttcttgcgtaaaaatacgattgcgtccggctttttttgcccgaatcatagaatcatcggcgaccatgagcagctggttgaacagatccgttactctggctgaacccggcgcccggctctccagccccatgctgatggtcagctggatcctattttgcccccaggtgaaggtttgcgactcgatgccctggcgaattttttccgccagcagcactccgtctcgcgcggatgaggtcagcgccgcgacggcaaactcttccccaccaatacgcgccaccatgccctcttcacccaccagctgccgcacctgctgcgcaaactgggccagcatacaatcgccgcactcgtggccccagcgatcgttaacctgcttgaagccgtcgatgtcgagcaccatcacggtgagcagctcgttttccgcgatcggctgacgtttcaacgcttcgcttagcccggagcgagaatagacccgggtctggaagtcgaaatcagcgcgcagggccagctgtttgaccaggttattaatcgcctcaacgctggaagcgacgatgatggggctgatcagcatcgcagcaatccccaggcgcgttgagaacagctgccacggctgcatccgggtatcgggggagagatggataagcgagttcgccaccagcagaatttcgctaatcccggtaataaaggtcaacaggcaggttaacggcagcggatagcgaatcgcgcaccaaatcagcgccggtaacgggaaggttatgctcccggccccgcccaccgccacgccgagcacaatcgacagcaccagcgcaatcgccggcaacagctgacgcaggcgaaaacgcccgaacgccgaagggagcgtgagggttaaaatgaacggcaggataagcacggcagtcgaaaactgttcgctaaaccagtccgccagttggggaataaacgtggcgcgttccacatctaccgaacccagcgccccgaccgccgcgcagagcagcgccgccagcagacagtagcaaaacaggcttagcgcatttatcggtcccggcatcgaatcagcccggcgcttatcccacaaaatgagctgcgccagggtgacgataaaaacgatattggagaagttgatcagaaaggaggcgacccccattccccaacgagatgttaaaccgtcatataccagcatggcggcaaaacaaacggcgtaaaaatagctgcgatttagccagatataacgcgcaaaaatccccgccattaccgcgttcagcggccagaagaacgacaattcttgtaccagacgcagcatcgcgccaaagaaatgcagtagtagcgttaaagtgaacaacaccagcgcatcacgcacgggctgttcctcacgaaacagcgtgaatgaccgaatcgacagtggagacattcatgattatccgtctaattgtttcaggcaattattatgttaataattagtaagcggttcatcatatcatgagaataattatcaggcatataccgccgcccgatgaattacagtctgctgcggtccggcgaattcatctggatcaccagccagtggtgaatcacctgcaccacgtagcgctgctcttcgtcgctgaggccgcgcccccgcgggatcgcgtgccacttttccagacagccgcgacagcaggtcgcggtggcatgctgggcgataaacaccggatgtccgcgcatcggggtctgcttaccgtcgttaggaatttgcgcaggggccagccgactggcgataaagtccgccgtgtgctggtcgataacctccgcgcccttatcataacaatactgccgttctttcacgccgaggcgaaaacgggagcgaaaagtggagcgctgcaggcgggcaaacaggttttctatgggcaccatcagaataccgacctccccagtttttgagtgagtttttccagtaaagcgatcccggccagcgagttcccggcgtcatcgagctccgggctccagaccgcaatcgccatctcctgcggaacgatggccacaatcccgccgccgacgccggatttcgccggtaaaccgacgcgccacgcaaattcaccggcgttctgatacatgccgctggtcatcatcagcgcgttgacctgccgcgactgaatgggggcgataaccggcgtctcaaggtgcggagcgatacctcggtcggcaagaaacagaaaggtgcgcgccagctctacgcagctcatctccagcgaacagtagtggaaatagttttgcagcaccgtggcgacatcgttatggaaattaccgaaggatttcatcagccaggctatcgcggcattgcgcgccgagtggtcgaactccgaacgggcaaccaccgggtcataggcgatatcgcccacaccgctcagacgacgcacgatttccagcatccgctgacgaggcgcgctgagacgactttgcagcatatcgcagaccaccagcgccccggcattaataaacgggttgcgcggtttgccttgttcaatttccagctgcaacagcgagttgaaaggctggccggagggatctttacccacccgctgccagatctcctcttcctgatagtggttcatcgcgaccaccaggctcaggactttcgagatagattggatagagaagcgctcgtgcgcgtcgccggcgctgtagtgctgaccgtcgaccgtacagatagccacgccgagcttatcgccgctgacgctggccagcgccggaatatagtccgccactttaccgcgaccaattagcggcctgacttcagccaaaatggcatcgagcattgcgttattcattaccgtcgccacgcgcggctccttgccaacaacaaaattcgggcggtaattataggcgcacgggacgcgaagaaacagcctctttctcgccctcgcgtcgccagggggatggttcgctcgtcagcggggcgcctgcccgggctaccaaacccgcaaatcgcacgaatcggtagcccgggaaaggcgttagccgcaacccggggatttttccgcaggctagcggcgatctctccagacggtctgcacgttgcagaattcatgcagaccaaaatgggagagctcgcggccaaatccgcttttcttcacgccgccgaacgccacgcgggcatcgctggcacagtagccgttgataaacactccgccgcactccagctcatcggcaaaacgctgggcctgcgcttcactggtggtgtaaactgttgctgaaaggccaaattcgctatcattagccagcgccagcgcgtgatcggcatcgcgggcttcggtaatcgtcgccaccgggccaaacagctcctcgcggaaaccggtcatctccgcggtaacgtttccgagcaccgtcggcgcgtagtagttgccggcgccttcgattttttccgcccccagcagcagggtcgccccctcttttaaggtcgcgcgcacctgctcgtgcagctcatcgcgcagatcgaaccgcgccatcggcccaatatagttctgctcatcgcgcgggtcgcccattttcagcgcggcagcggcggcgacaaatttctgcgtaaaggcctcggcgatgcccgcttcgacgataaaacgcttcgccgcggcgcagacctgaccggtattctggtagcgacctatcaccgccgctttcaccgcctcgtcaaggtcggcatctttaagcacgataaagggatcggagccgcccagctccagcacgcattttttcaacgccgcgccggcctgtgcgccaatggccttcccggcgcgcacgctgccggtgacggttaccgcggcgatgcgcggatcgttaatcatttgcgaaacgccatcgttggtggcgttcacccagccaaagacgccgtccggcacgcccgcagcggcaaaaatttcgccgatcatcgccgcgctgcccagcacgtttggcgcatgcttaagcagatagctgttgcccgccagcagaatgggcaccgcgccgcgcagcacctgccacaccgggaagttccacggcatgacagcgaggatagcccccatcgggcggtactcaatcaccgctttattgtcttcaaccagcgtcgcctcggtattgagcatcgccgggccgtgttcagcataccagtcacaaagattggcggatttagccacttcgccgcgcgcctgggcaatcggtttacccatttcgcggctaatcatttgcgccagcgcttcgccacgggcgcgcatcgcgctaccgacgttacgcagcgtcgcagcgcgctccgccacgctgacgttgcgccactgacgatacccctgttccgcaagggcaatggccgcatcgacctgctgttcgctggcccagggcacagacgacaaagtttcaccggtggtcggactcacggaaatcgcatgagtagcagataaattcatcgtttttctctctgtgttgattgcgaagtgaccttatactgtcttacccttcctttcattaaaaatgaataatattaagcaacccattcacaaaagaagaacaatatggatctgacccagcttgagatgttcaacgccgtcgccagcaccggcagcattacccaggccgcgcagaaggtgcatcgcgtgccgtcaaacctgaccacacgcatccgccagctggaggcggatctcggcgtcgaactgtttattcgcgaaaatcagcggctgcggttatcccccgccgggcacagctttttacgctatagccagcagatcctcgcccttgttgatgaagcgaggatggtggtcgccggagatgaacctcaggggctgttttcgctcggctcgctggagagtaccgccgccgtgcgcatttcccctactctggcgcactttaatcagcgctatcccaagattcacctggccctctccaccggtccttccggcaccatgatcgacggcgtacttgagggaaatctgagcgcggcgttcgttgacggtccgctggtgcacccggggctggaagggttaccggtgttcccggaagagatgatgatcgtcgcgccctttggccacccgcccattgcccgcgccagcgaagtgaacggcgccagcgtctacgcgtttcgcgccaactgctcctatcgccgtcattttgagagctggttccacgccgatcgcgccaccccggggcggatccatgagatggagtcctaccacgggatgctggcctgcgtcattgccggcgccggactggcgctgatgccgcgcagcatgctggagagtatgccgggccatcagcaggtatccgcctggccgctggccgaagagtggcgctggctgacaacctggctggtctggcggcgcggggcgaaaactcgccagctcgaggcgtttatagcgctgctgaacgaagatcgacaagcagcagcttctccataaaaatgcttaacggatccggctgatacggcgcaaaggcgctgcgggtctggtagccattgcgcgtgtataacgcgacggcggcgtgctgatggatgcccgtttcaaggcgtacggtatggcattcgcgatttatcgcctctttctccagcgccgccagcagtttttcccccagctgctggccgcgatgggccgggtgaataaacacccttttcatctcgccaatcccctcttcgccgagcacgatggccccacagccgacggcccggtgctgcccatcgcggataatgagcgcgatgaccgacgccgccggtaacgcgctcaggtcgataagatgattgctttccgccgggtagagcgtctgctggtatgcgtccagctcggcaattaaggcggtcagatccgggtggtttagcggggtcgcggcgatagtgtacataaagaagctccttttttgagcgtactgtagcgcggggcgtccgcggagccgccatagcattaacttatagcttctgacccgacttgcgctcccccggtgagaggcagtaattttgcgacataacctcttttatcaggaaaatacgatgaataccaaagcgcgcaaggtgatgattatcggggccggaaacgtcggcgcatcagcggcctacgccctgttaaaccagaatatttgcgaggagctgatccttgtcgatctcaatacctctcgcgccgaagcgcacgctcaggacctgagcgacgcggccgcctacatgccgggcatgatgaccatttccacccgggaagccagcgactgcgccgatgtcgatatcgcggtcatcaccgtttccggcggcgcgctcaagccgggtcaaacccggctggacgaactgaccaacacggcaaaaatcgtcaaaagcatcgtcccgcagatgatgcgcggcggcttcaacggcatctttttggttgccaccaacccctgcgacatcatcacctggcaggtgtggcagctttcgggcctgccgcgcggccaggtgctgggtaccggcgtctggctggacacgacgcgcttacgccgggtactggcccaggcgctggatatcggcgcgcaaagcatcgacgcctttattcttggcgagcatggcgatacccagtttccggtgtggtcacactcggcggtttacggctccgccatcgccgatgtttaccaaaaacataccggccaggctctcgaccgggagctgattgccgaaaaggtgcgcaagctggggtttgagatttacgccggcaaaggctgcacggagtacggcgtcgccggaaccatcgccgaaatctgccgcaatattttcaccggcagccatcgcgcgctggcggtgtcgtgcattcttgacggggaatatggcgtaaccggcgcggcggctggcgttcccgcggtgctgacgcaaagcggcgtgcagcagattattgagctgcagctggccgatgatgaagcggagaaattccgccactctatcgaagtgattaaagccaatatcgcccgtctaccgtgatggcctatttttcctgcaggttacgcaggaatagcgcgcaggataagtttgccgggtaacccactcggattcgggatcggcgggtctgttgccgatcccgttttatgatgaagggcgagctagcgtagcgtgatgacgccatttaaataggtcaccgcctggccgctcatcaatacgcgttttcctttcagttcgcagcgcatatcgccgccgcgcgcggaaacctgacgcgccagcagctgagttttaccccgctttgcgctccagtaggggatcagcatagtatgcgccgaaccggttaccggatcttcccacaccgcttcaccgggtgagaaaaagcggctaacgaagtcatattccccgctgcccgcggcggtcacggtcactttatgttcgccgggcgtcatcgcagcaatattcggccgcagggcttcgacctgctcacgggaggccagttcgataagccatgcgcgccccttgcgggcatgcaggtagcgctcaatccccagcgcggagagcatctccgcgggcggctcgcgctcttccgtttctcccgccgggaagtccagggtcagccagtcgccctcgcggctcacggtcagccgaccggaagcggtcgcgaagtgaatgaccgcgtcaggataatccaggtgatgaaatatcacgtgcgcgctggcaagcgtggcgtggccgcagagattgacctcattgcgggtggtaaaccagcgcagcgcaaaaccatcgctctcaggtaccacaaacgcggtttccgactggttgtgctgctgcgccattttgagcagcagctcatccggcagccactttttaagcaggcataccgcagccgggttgccggcgaaaggctggtcgctgaacgccgccaccagataaaaaggaatttccgtcaccgtccctccttaacgaagcgtaatcgtgccgattaagtaggtggtcgcctgaccgccgatcagaacccggtcgccccgccactggcagcgcaggtcgccgccgcgggccgacacctgccgcgcctgcatgtccgttttgccgagcttctcgccccagtagggaatcagcatactgtgcgccgagccggtgaccgggtcttccgccaccgcctcgcccggacagaagaaacggctgacaaagtcatactcttcgtccggggcgctgatacagatcattttgccgaggcgctcaagcagctgcatatccggacgcaccgcctccacctgctggcggtcggctaaaaccaccaggtaatcacgcgccacgcggacttccaccgcgtcgctcagccccagcccggccagcagctccgcaggcggctgctcaacggcggtcgtcgcccaggccgggaaatccagggtcagccagtcgccgctgcgcgtgacgcgaagctcgccgacaaagcgggtactaaatacgattgtcgatgaggggtggtcaaaatattcaaaaatgacgtgcgaggccgccagggtcgcgtggccgcagaggttgatctcatccagcgtggtaaaccaacgcagctcaaacccctcatccgtacgcacaaaaaacgcggtctccgactgattgtgctgctgcgccattttcaacagcgtttcgtccggcagccattcggtcagcgggcaaacggccgccgcgttgccgccaaagctccgatcgctgaaggcatccaccagataaaagctaatttcctgcattgttctgtccctctatttttttacttatcgataacatgacataaacgtgagaaatccacacgtttaatagaaaaattaatccgttagtgccgaaaatctggctgaagcgaaaatgagatgtagatcacaaaatgattgtattttcagcagcaatcgttttaagatcgtcccacttctttcctctttgtaaccagccctgaacttatgatgacaaatacggtttcacgcaaggtcgcgtggctgcgcgtagtcacgcttgcgattgcggcatttatctttaataccaccgaatttgcgcccgtgggcctgctgtcggatatcgccgacagctttggcatggaaacggcgcaggttgggattatgctgacgatctacgcctgggttgtcgccctgatgtcgctgccctttatgctgctgaccagcaagatggagcgccgtcgcctgctggttggcctgtttatcctgtttatcgccagccacgtgctgtcgttcctggcctggaacttcaacgtgctggtgatcagccgtatcggtatcgcctttgcccacgcggtgttctggtcaatcacctcggcgctggctatacgaatggcgcctgcgggtaaacgcgcccaggcgctgagcctgattgccaccggtaccgcgctggcaatggtcttcggtatcccgattggccgtatcgtcgggcaatactttggctggcgcaccacgttcctggtcatcggcctcggggcgctggttaccatggtttgcctgatcaagctgctgcctaagctgccgagcgagcactcagggtcgctgaaaagcctgccggtgctgttccgtcgccctgcgctgctgagcatctatttgctgacggtgattgtggtgaccgcgcactataccgcctacagctacattgaaccgtttgttcagacggtcgccggcctgagcggcaacttcgctaccgtgctgctgttgaccctgggcggcgcgggcatcgtcggcagcatcctctttggtaagctcggcaacctgcatgcgtccgggttaattaacgcggcgattggcctgctgctggcgtgcctgctgctgctgctgcccgcctcgcacaacgccaaccacctgatgctgctgagcgtcttctggggcgtggcgatcatgattatcggtctcggtatgcaggtcaaagtgctggcgctggcgccggacgcgaccgacgtggcgatgtcgttattttcggggatctttaatatcggcatcggcgcgggcgcgctggtgggcagccaggtcagtacccatctgtcaatggcgtccattggctatgtcggggcgatccctgcggtcgtcgcgttagtgtgggcggtgatgattttccgccgctggccggtgtcgctggaagatcagcagccgcatcactcctgatcgtgctgctaaaaaaactgccggtcgtgagatcggcaggtttttttacgtctggtatcaggacggcgatgaccgtcaggcgtgataagtggaaataatctccagcacgccgttaataataaactgcacgcccatacagaccagcaggaagcccatcaggcgggaaatcgcctcaatgccgcccttcccgaccagacgcatgattgccccggagctgcggagacagccccacaggataatcccgaccagggcaaaaataatcggcggcgcgaccagaacaacccagtccgggaagctcgccccgtgctttaccgtagacgctgagctgataatcatcgcgattgtccccggccctgcggtgcttggcatcgccagcggaacgaaggcgatattcgccgtcggttcatcctcgagctcttccgatttcagcttagcttccatcgagtcatgggctttttgctggggaaagagcatgcggaagccgataaaggcgacgatcaggccgccggcaatacgcagaccgggaatcgatattccgaaggtgttcatcaccacctggccggcataccaggcgaccatcaggatggcgaacacataaaccgaggccatcagcgactgacggttacgctcggcgttattcatattcccggccaggccaaggaacagcgccacggtagtcagcgggttcgccagcggtagaatcactaccagtcccaggcctatcgctttaaaaagatccatcatagtgaattaaggtcctgtcaatattggattatcaaaaaaatgacgcgtgctgagtatatcgtctgttgccagattgtacccgttctcctcaggacgcattcacccttccttcaaatcataagataacaacgtgaaatagagtgacctgcctcacaacaattcgttttagcaaatcgtggcatcgggtaattcatcaggttgacttatatttgcctaggcaataatatctcccgcaactaagtcattgcctgggcaaccattgtgaaaagtacaagcgacctgtttaacgaaatgatccctcttggccgcttgatccagatggttaaccagaaaaaagatcgcctgctcaacgactatctctcgccgatggatattacttccacccagttccgggtgctctgttccattcgttgcgaagtgtgtattacccccgttgagctgaaaaccgtgctttcggtcgacccaggcgcaatgacgcgcatgctcgaccgcctggtctgtaaaggctggattgaacggttacccaacccgactgacaagcgtggcgtgctggtacagttaacgccagacggcgcagccctttgtgagcaatgtcatcaggttgtgggtcagaaattgcaccaggaactaacaaaaaatctgtcgacggatgaagtggccactcttgagtgtttactcaaaaaagttctgtcgtaataagaagaggtaagatgatgtccagacgcaataacgacgccatcactatccatagtattttgtcgtggatcgaggataacctggaatcgcccctgtcgctggagaaggtttcagagcgctcaggttactccaagtggcacctgcaaagaatgttcaagaaagagaccggtcactcgctgggacagtatatccgcagccgtaagctgaccgagatcgcgcagaagctgaagcagagcaacgagcctatcttatacctggccgaacgctatggttttgaatcgcagcaaacgctgacgcgaacttttaagaactatttcgatgttccgccgcaccagtatcgtattaccaacgtgccgggcgagtcgcgctacctgctcccattaaataactgttgttaaccgcctgcaaaaagacgtattgaggaaatcatgaaactattcgcttccgccgccatcgtgctattggcgctggtctcgagccaaagttatgcggagcaaaccagcaccccggttcgccacaacaaccgggatgcgatgattattccttccgaacataatgattcgccttttgatttcaatcacatggcctctggcagtgataaatcagatgaacttggcgtgccctattacaaccagcaaagcctgtaaaatccctttagccccgtgaccggggctttttttaccctcgcgccatgcccggacgcacgatccgcaggccaaatacgttgatatacagcccggccataatcagtaccgcgcccagcagctgcaggctattcagcgtctcgccgagcaataaggccgcgctggccatcccgaccaccggcaccagcagcgacagcggcgccacgcgccaggtttcatagcggccgagcagcgccccccaaataccatagccgacgatggtggcaataaacgccagatagagcagcgacaggatcgtcagcaggtcgatatgcagcaggctttccgccatgacctgcgggccgtcgaggatccacgacgccagcataaacggcagcaccgggatcagcgcgctccataccaccaaagacataatcggcggccggctcgcatgcgacataattttcttgttgaagatattgccgcaggcccagctcagcgccgcggccagcgtcagcataaagcccaccagcgggacatgctggccgccgaggctggcttcgaccagcaccagtacgccgaaaatcgccagcgcgatccccgccagctgtttcccctgtaaacgttcgccgaaaataaacgccccgagaatgatggtgaaaaaggcctgcgcctgcagcaccagcgatgccagtccggcaggcatgccgaggctaatcgcgcagaacaaaaacgcaaactgaccgaagctaatcgtcaggccgtagcccagcagcaggctcagcggaatttttggccgcgcgacgaagagcagcgccgggaaagccaccagcaaaaagcgcagtccggcgagcatcagcggcggcatattatgcagccccaccttgatcaccacgaaattcagcccccataccaccaccaccagcaatgccagcagcccgtctttacgcgtcatacccgcctcggttgttattggaatttttgcgaacaaaatcaaactaccgaataattcgtccgccgcatagatcattattttcggtagggcgctggcgtgcttttcatcacccccgggaactatacaagccccggttagcgtgctatttgtgatcgtgacaacaaaaataacatcacatcaggcaaggaaaaaatgataccgactctcaggcgctcaaccgcagcgctgctggcttcgtcgttgctgttaaccattggccgcggcgcaacgttaccttttatgacgatctacctcacccgccagtaccagctggaggtggataaaatcggctatgcgctgtcgagcgcgctgatcgtcggggtgctgttcagcatgggttttggcattctcgccgataagttcgaaaaaaagcgctatatgacgctcgccgtgctggcgtttattggcggctttatcgctattcctctggtcaatagcgtcgcgctggtggtgtttttcttcgcgctgattaactgcgcctactccgtcttctcaaccgtgctgaaagcgtggtttgccgacgtgctgtcgccggaaaagaaggcgcagattttttcccttaactatacctttctcaatattggctggaccgttgggccgcctatcggcactctgctggtcatgcacagtattaacctgccgttctggctggcagccggctgcgccgcccttccgctggtatttattcagctgttcgtgcagcgcaccagcgccgcgattgctcaggataacgcggtccagtggtcgccgtcggtgctgctgcgcgatcgcgctctgctgtggtttaccctttccggcctgctggcctcctttgtcggcggctctttcgcttcctgcatttcccagtatgtgctggtggtagcggacagcgattttgccgaaaaagtggttgcggtggtactgccggttaacgcggccgtggtggtggcgctgcagtatgcggttggtcgtcgccttaccgcccgcaatattcgcccgctgatgacctttggaacggtctgttttgtgctcgggctgggcggttttgttatttccgataacagcctgctgctgtggggcgtctccgccgccatttttacgctcggagaggttatctacgcgccgggggaatatatgctgatcgataacattgcgccgccgggcatgaaagccagctacttttccgcccagtcgctgggctggctgggggcggcgtttaacccgatgctgaccggaacgattctgacccatctgccgcactggtcgctgtttgtgatattgatgctggcgattatcgccgcatggctgatgattttccgcggcatgaacgttcgtccgtggaacggtagcgcggtcgcccgcgcctgatgccgggcgccgtgcggctgtcaggttgctgtcgcgtccctgtcgggtttcgatcgtggtgcccgacagcccgctcgatgatactccatctcaggttttcacccggagatagaaacaatgaacagtagtcatcaggttaaacaattacgtttgcagcgcgcctggtcgcaggagcagcttgccgaactggccggcgtcagcgtgcgcaccattcagcgcatcgagaacggcgaccgtcccggcctcgagacgctcagcgcgcttgcggcggtatttgaagttaacgtcgccgagattagcggcgaatcgccggcgggccacgaagcgtcgctggatttacgtattgaggaagccaaagcgcgcgtcgaacgcgagagccgtttttaccgttcattgacggtggccgtcgtcgtttgcgttctgctggcgctgctgaactggctgagcggcgcagagagctactggtccgcatgggtggcgatcgtctggggagcgctgctggtggttaaagggttgcgcctgtttgtttttggcgaatggattaatcgctggcgtcaggcgcgcctgcagcggctgctgcgcaaatagccctctgcgcgcttttcccgagggcggcgcaagcgccttgcccgggctacgggttcatcgccgtctgcgagcggtagcccggacagatgcgcagcatcgcctccgggaaatcatatccaatgcgccctgtggcgagctccccgggggcggcgcaaagcgccttgcccgggctacgggtccatcgccgtctgcgagcggtagcccggacagatgcgcagcatcgcctccgggaaatcatatccaatgcgccctgtggcgaactccccgggggcggcgcaaagcgccttgcccgggctacgggttcatcgccgtctgcgagcggtagcccggataaggcgtcagccgccatccgggagccatatccaatgcggcctgtggtgagctccccggggcggcgcaagcgccttgcccgggctacgggccagcagactgctgtatacctgtagcccggctaagcgcagcgcgagccggggggaggccgccatccggggcgagttaaatggtgaccatcccgcggacgccttcggcttccatatcgccgccgttgccctgctggataatcgcgccgcgcgacatcaccagatagcgatccgccagaccggcggcaaaatcatagaactgctcgaccagcagaatcgccatatccccgcggttcgccagctgacgaatcacctcgccaatctccttaatcaccgacggctgaatgccctccgtcggttcatcaagaatcaacagctgcggacggctggccaacgcgcggccaatggccaactgctgctgttgcccgccggaaagatcgcccccgcgccgctgcttcatggttttcagcaccggaaacagctgataaatctcttccggcaccgcgcgcgcgtcgcgggcgggaaagcgggacagccccatcagcagattctcctccaccgtcaggcgcggaaaaatctcccgcccctggggcacgtaggcgatccccgactgcacccgctggtgcggtttacggtgggtgatattcttctcctgccacagcacctcgccgctgcgcgccgggatcagccccatcaggcacttcagcaaggtggtttttcccaccccgttgcgcccgagcaggcaggtgatctcgccctggcgagcggcaaaatccactccacgcaggatatggctgccgccataatattgatgtagttgattaacctgtaacatccgcgctccttagcgtccgagataaacttcaatcacctgttcgttggcctgcacctcgcgcagcgacccttccgccagcacctgtccctgatgcagcaccgtcaccctgtcggcgatggtctcgacaaagcccatatcatgctcgaccaccatcagcgaatgctgcccggcaagggtgcggaacagctcggcggtatattctgtctccgcatcggtcatcccggcggcgggttcgtccagcagcagcagatgcggctcctgtaccagcagcatgccgatttccagaaactgcttttgcccgtgcgacagcagccccgccggccgatagcgttcgccctccagccgcagcaggcggagggtttcgctgattcggtcggcctgctcgctgttcaggcgcgcccgcaggctggcccacaccgatttatcacctttcattgccagttcgagattctctgccaccgtcagcgcctcaaagaccgtcggtttctgaaacttgcgcccgatgccctggcgggcgatggcgatgggatcgaggattgttaagtccaccgactgatcgtaaagcgccctgccgctctgcggccgggttttgccggtgatgacgtccatcagggtggttttaccggcgccgttcggcccaatcacgcagcgtagctcgcccacgccaatctgcagcgacaggttggtcaacgcctgaaaaccgtcaaagttgacgttaatctcttccagctgcagtaccggatcggtctgctcgcgaaagcggtccgtcggcagctggcgggtaaatagctcttcatccaatggcatcagcgatctcctttacgcagcaggccgataacgccacgcggtaaaaacagcgtcacgataataaaaatcagccccagaaagagctgccagtactccggcatcgccacggtaaagtagcttttcgcgccgttgaccagccccgcgccgagcaccgggccgattaaggttccgcgaccgccgagcgccacccagatggccgcttcgatagagttggtcggcgacatttcgctggggttgatgatcccgacctgcggcacgtacagcgcccccgccaggccgcacagtacggctgaaagggtccataccagcagcttaaagccgcgcgggtcgtagccgcagaacatcaggcggttttcagcatcgcgcaccgccgtcagcacgcggccaaatttgctttgcgccagcaaatagccaatccacagggtgagcaacagcagcagtaccgtggccataaacagcgccgcccgcgtgctgatggcggtgacggagaaaccgagcagcgtggtaaagccggtaaaaccgttgttaccgccaaagccggtttcgttacggaaaaacagcagcatcccggcgtaggtgagcgcctgggtcataatcgaaaaatagacgcctttgattttcgagcggaaggcaaaccagccgaaaaccagcgccagcaggccgggcaccagcaccaccagtagcatagcccaggcgaaatgctgggtgccccaccagaaccacggcagctcgctccacgacaaaaacgacataaaggccggcaatccgtcgcccgccgcctggcgcatcaggtacatgcccatggcgtagccgccgagggcaaaaaagatcccatggccaagcgagagcatcccggcatagccccagaccaaatccagcgccacggcgacaatggcgtagcagaggatcttgccggtcagcgtcagcagccaggtggagaccgccagcggatgcgtggcgggcagcagcgccagaaacggcatactcagcaggcccagcagtagcagcacgccgaaccagcgcagcgggcgcggcgctttgcgcgccagcgttaaggtaataggttggctcatcagtcaataaccctccctttgagggcgaacagtccctggggacgtttctggataaacaggataatcaagaccagaatcaggatcttacccagcacggctcccatctgcggttcaaggattttgttaaagatgccaagaccaaacgccgccgccacgctgcccgccagctgaccaacgccgccgagcaccaccacgaggaaggagtcgataatgtagccctggcccagctcgggcccgacgttaccgagctgcgacagcgcgacgccgcccagccccgcgatccccgaaccgaggccaaacgccagcatatcgacccgtccggtcggcacgccgcagcaggccgccatcgcgcggttttgcgttaccgcccgcacgttcatccctagccgggtcttgttcagcgtcagccaggtaaacagcagcaccagcagcacgaaaaccagtaccgccagacggttccacggcaggatgagattcggcagaacctgcacgccgccggagagccatgccggattggcgacctcaacgttctgcgcgccaaatagcatccgtaccagctggatcagcatcaggctgatcccccatgtggcgagcagcgtctcaagcgggcgcccgtacagatgacggatcacggtgcgttccagcgccataccgataccgccggtgatcaggaacgccaccggcagcgcaatcagcggatagaaggccagccactgcggcgccagctgcgccagcgcctgctgaaccagccagcagctgtaggcgccaatcatcagcatctcgccgtgggccatattgatcaccccgagcagaccgtaggtgatggccagaccgagcgcggcgagcagcaggacagaaccgagggagaggcccataaaagcctggccgagaagatcgcccagcagcaggcggtgctggattttactcaggctctcctgggccgccgcgcgaatcgccgggtccggctcatgccgggcatcggtatacggcgtcagcagcgcctgagtttccgggtcaccggagtggccgagcagctcgatggccgccagccgctgtgcgggctgaggactgacaagctgtaaacgggccagcgcaatttccagctgcgacttcaccgcgccgtcggtttccgccgtcagacgctgctgtagcagccccgccatctcaggcgtcgcttcgcgctgcagggttttcgccgccgcggccctttccgtgacgttgtcactaaccaggagatgcgtcgccagcgcgcctgccgccaggttacgcaggcgattggtcaggcgcaccggttttgttgggccgacgggcgccggaaccgcgcccagcgccagcaggctgtcgccctgtttgctgaacgcatgaccgccgctatcggattgcaatgtttcacttttcagcgcccgcagcagcggtaaacgcggcgcttcgggcgcggcggcccactgttccagcagctgagcctgctggctgcgattggccgccacaaaatcgtcggcgtccgctgcctgcgcccgccacggtatcaagaccatcagcagcgcgaagtaacacatgaggcgtaatgcgttcatggtcgttctccttttcggggaaatccgggcttcgggcccggaagactgaatcattcaccccggcgcggcgccggggtctaacgcttagttgctgacggttttaaccgggtgatccggctttttatcattcccggcaatccacgggctccacggctgggcgcgtaccggctcttcggtctgccagaccacgttaaactggccgttgctttcgatttcgccaatcattaccggcttgtgcaggtgatggttggtggcatccatggtcagggtaaagcctgacggcgccttgaaggtttggccggccatggcatcacgcaccttgtcgacatcggtcgatcctgctttcgtcaccgcctgcgcccacatgtgcaggccaacccaggtcgcttccatcgggtcattggttaccacggtatcggcgtttggcagcttgtgggctttggcgtaagcgcgatagtcggcaacaaactgtttgttggttgggttatcgacggactcgaagtagttccacgccgcgaggttgcccaccagcggtttagtatcaatcccgcgcagctcctcctcgcccacggaaaaggctaccaccggcacgtccgtcgccttcagcccctgattagccagctctttatagaacggaacgttggaatcaccgttgatggtagagaccaccgcggttttaccgccggcggagaacttcttgatattggcgacgatagtctgatagtcgctatagccgaacggggtatagacctcttcgatgtctttatcctgaatgcctttggcgtgcaggaaagcgcggagaattttgttggtggtgcgcgggtagacgtagtcggtaccgagcaggaagaagcgtttcgccccgccgccgtcttcgctcagcaggtattccaccgccggaatcgcctgctggtttggtgccgccccggtgtagaagacgttcggcgacatctcttcgccttcatactgtaccgggtagaagagcaaaccgttcagctcttcaaataccggcagaaccgatttgcgcgatacggaggtccagcagccgaacaccgccgccaccttatcctgcgtcagcagttgacgcgctttttcggcgaacagcggccagtttgatgccggatccaccactaccggttccagttttttacccagtacgccgcctttggcgttgatgtcatcgatagccatcagggcgacatctttcagcggggtttcagaaatcgccatcgtcccggaaagcgagtgcataatgccgactttaatggtgtcggcggcataaacctgtaaggagaagcccatgctaataacagaggcggagagagcaaaagcttttaatagtgttcgacgctgcatgtgtgtcactcctgaatagcgcaaaaacaaaaaaatgaattaacgactcaccggaagtgataaggcaaaaacgatgccaggttgtgaaagcgtctgaaagcgcggcagaatacggggaaaataaaggtgggtgcacagcgttgccttaaaatagtgcaacgctgcgctatggagagattaccagacctgcgcggcgatgccggtgaccaggcggactttatcccactgctgggcttcggtcagagagttaccctcttcggtggaagcaaaaccgcactgcgggctgaggcaaatttgcgccagcgggacgtactgcgccgcctcctgcagacgagccttcaccccttccgggttttccagctccccgtttttagtggtgatcaggcccagtaccacctgctgatggccggggcgaatgtagcgcagcggcgcgaagtcgccggaacggtcattgtcatattcgaggaagaacgcgtcgatgttaacgccgccgaacagcacttccgcaaccggctcgtagccgccttcggagatccaggtcgagcggaagttaccgcgacacacgtgcaggccaacggtcagatcctccggcttcccttccagggccttattcagaacgcgggcataaatgcgcgccagctcatccgggtcttcgccgcgctcgcgcacctgctgtcgctgctcatcggagcagaggtaggcccagacggtgtcatcaagctgtaaatatcggcagcccgcatcgtagaaggcgcgaatggcatcgcgccaggtggttgccaggtcatcgaaatagtcggcgagatccggatacaccgtcgcgtcgatatctttccggccgccgcggaagtgcagcacgctcgggctgggaatggtcatcttcggctgagcgctgccgctgatgctcttcagatagcgaaaatcttccagcatcgggtgatcgccaaaggccagtttaccggtgacgcgaacgccgtgcgctttggtctgtaccccgttgaactgaatgcccttttctgaatcgtagcgctcaacgccctgtagtccgtcaaagaaatcaaagtgccaccacgcgcggcggaactcaccgtcggtgaccacatgcagcccgcactcgcactgctgctgcaccagaacgcgaatcgcctcattttctatctgccgcagctgctgcgcgtcgatggtgcctgcggccagctgctgacgggcctgtttgatggcgtccggacgtaaaaagctgccgacaatatctgcgcggaacggggcctgatgacgttgcatggtgtctccttagcggcgggcaaagttaattacccaccgtgatagttcattatttgaatttatagacttctggatggctatatgtccagatactggcatgcagaggtttcatcggcaaacgacaatatttcatggcacatgaaataaattcactttgcgaaaggcaacccttcatcttcccagccggtcaggccgccgagcatcatttttaccgggcgccccagcagagccagcttcatggcggcgacgtccgccccgttgcagtgcggcccggcgcagtagaccacaaacagcgtgtcatcaggccactgcgccattctggtttcatcaatttgtcggtgcggtaaatgcagggcgcccgggagatgacgacgggcaaaggtttcctcactgccgacgacgtgcagcagaacaaaatccacttctccttcgcgcatcgcgctgtagacatcggcgcagtcggtctcgaggcttagcttatgacgaaaccaggcggcggcgtcggtagaactggcgggggcaatagcggttacaacactcatggcatcttctccttgtctgtgataccactactttaattaaccgcctgcgcgacatctgccgagaaccatgactgaaaacgctgaaatcctgacaatcccatccgtgacgttgtcatgccaccgggttgttgccctcgcctacgatggcctgtgtacctttgaatttggcgtcgccgtagagatcttcggcctgccgcgcccggagatgggcgaacgatggtatcgctttgccgtagccgccgtcgacgacggtgagctgcgggcaaccggcggaattcggctcatgaccgacggcggtatggcgctgttaggcgaagcggacaccatcgtggtgcccggctggcgcggtattaactcccccgtgccgccagcgctgtgcgaggcgctggtcgccgcccatgcgcgaggctgccggataatttctatctgctccggggttttcgttctggccgcggccgggctgctgaacggccgccaggcgaccacccactggcgctataccgaccagctgcgggcgcggtttccgcgcattgaggtgatcgatgacgtgctgtacgtcggcgccgaaggcgtcatgacctccgcaggcagcgccgcgggtatcgatttatgtttgcacctggtgcgcgaggactttggcgtcgaagcggcgaatcttgtcgcccgacggttagtggtttccccccatcgcgacggcgggcaggcgcagcagattgttcgcccggtggccaaagcgcgggagagccagcggctggggcaattatttgatttcctgcaccagaatctcgccgctggccacaccgtggcctcgctggcggaaagaaccggcatggggcagcgcacgtttttacgccgtttcgaagacgctaccggcaaaacccccgcccgctggctgcttgacgagcgccttcagcgcgccacgcagcacttagcccacagccggctgagcgttgagcagattgccgagctttgcggtttctcaaacgccagcaccctgcgccatcacttccgccagcagtttgcccttagcccgttgcagtacaggaaaagcgcgctggcgggtaaaaagggggagtgattcacatggataatagtcacgccgggcaatttgttaagcgtttgtttagattagtcgggttaagatgtatccaacaaccgtaaacccgttcaatgaggacaacatagcgcatagcaaaactaatggaggttaatcatgctgggaaatatgcatgtatttatggcagttctgggaaccattctgttctttggatttcttgccgcatacctgagccacaaatgggatgactgatgaacgacgataatccccacccgtaaacgccccctgctgccaatgcaccagggggcgttctgcttttggcttgccgatcgatgaaccaccttatacacgataatttatcgtatcagtcaccaggagaaactccgtccgaacatccctcaacagcccactcgatgccgatcgttgataggctatgttatgctttgtcatcacgggcaaggaggcagaatatgcacatcaataccaaaatgaggattgcggcgcttttataccttatggcggcgtacgcggttgctctgccggggcttgcgctgtttacagacctggtgataaacggtggcattattgatatgtggaaaggcgcgtattcatttatggacctgcttgcccgacgtaaaatactttatctgcagtttgccgggctgggcgctactctgggttgtgtctactggctgtttttcttccgaaaataccgccaccacgatcccctcgataaatattttaagtagcgcccggcacgacgtactgattatgcccggtcagcgaatgatgaaatcagagccagaagcatcgcgcataccttcataccgttcgctggacatccgtcagctgcggcgaggcttccagccctttgccagggttctatttagcctgcagctcccggcggataatttccgccccggcgcttagggcattgagcttgccgctcgccactggacgcgatagcggcgccatgccgcagttggttgaaggataaagcttatcggcatccacaaactgcagcgctttacgtaaggtcgcggcgacttcctccggcgtttcgatcgcattggtcgccacgtcgatggctccaaccatcacttttttaccgcgaatcagttcaagcagatccatgggaacacgtgagttatggcattccagcgagatgatatcgatgctggaggtttgcagcttaggaaacgcttcttcatattgtcgccactctgttcccagagtctttttccagtcggtattcgctttgatgccgtatccatagcagatatgtaccgcagtttcgcatcttagcccttcaacggctctttctaaggccgcgatgccccaatcattaacctcatcaaaaaacacattaaaggctggctcatcaaactgaataatgtcgacgccggcggcctccagctccctggcttcctgattaagtatcttcgcaaattcccaggccagtttttcgcggctcttatagtgattgtcatagagcgtatcaatcatggtcatgggccccggcagcgcccacttaatcggctggctggtgagctgacgtaaaaaacgcgcatcttcgacaaaaacgggtttttgacgctcgacggcgcccacgacggtcggaacgctcgcatcgtagcgattacggattttaacgacttcgcgtttttcaaaatcgacgccgctgaggtgctcaataaacgtagtaacaaagtgctgacgggtttgctcgccatcgctgacgatgtcgatgccggcgcgcagttggtcaaataaggacaggctcagcgcgtcttttttcccggcaattaactcttcattctgcagtttccatggggaccacagtttctcaggctctgcaagccaggacggtttcggtaagctgccggctgttgaagtgggtaataattttgtcattatcgatagccttatatatgcgatgtcttaaagagcgtaatgagcagaccattgctgcagaatatttttatacggtttaataaagtgctcttcggtaaacttcccctgctctaccgccagctggctgcgctcttcacgatcgtaaacaattttggttaatgaatggtcctgatggtgcagatcgggctgatagcagagtcctgcggcagagttggcgttgtagatctccgggcggtatatcttctggaacgtctccatcgtgctgatggtgctaatcagctcaaggctcgtgtaatcgctcagcaaatcccctgagaaataaaaggccaaaggcgcaacgctgtttttcggcataaagtagcgaaccttcaggcccattttgccaaaatattgctcagtcaacgatgaaccctctgggcggtattcgagccccaggacaggatgttgatttccggtctggtgataggtgtctttgctggagacgctaaggcaaataaccggtgattttttgaaattggccttgtactccgctgaattgacgaaatgtttaaatatgttgccgtgcaaatcgccgaatccttccggaaggctaaaacctgcgcgtcctttattatggtctaacagcaatacgctaaagtcgtagtcgcgaacgtacgaagagaaattattgccaacgatacccgcaatacgttcatcggtctttttatcaataatgctggtttgcaatatttcaatcaccggaaaggtatcgccggtggcgctgatattcatttcggctgaaataatttccagcacaacggcatagcgatcgcctttggggttatcccagtgcgccagcgtattgaaacgattgtcaatcatgactaaggtattgcgcagattctcctggcgattttcccctcttgctaaattagcaaagttggttgtaatacgcgtattttctgaggggttatagttttcatcaaagagagtgcgtttaatagtaaaggtaaattgttgattcattgcagatgtgcatcctaagttctgagataaaaactgcagtcctttctgatggttgcaggctggcgcaggcttccataagcagtcttcatcttcatattatctatatcgaatacagcatgttatgccagagccattagatgagtgaaagcgagttaatttcattacaacatgagccatattcatggtctggcgtcagcccatgctgtatctcgttgaacagagccagccgctcttgccaacgagcttgtcctgccggttaaacatccgcacattttcctgttcgcctgtatgagttgatgctgaagcaagaaacatcagaggtcggccagggtaaacacgacctcaagcctggcgtctttcttttcaacaaccacactcttcatgctcctttgcgctctgtcgggcgcgatcgttggaggaatatggaagtgggaccggcgcgttttcatgctttactttggtgatgtccaaaacctgactaacgctaccgatattttttctggcatatttatgttctatggttaattcggattatcaacagcgaatatagccatcaacaacccgctctaacttattgatttgagggatacaatgaataatgtcattctcagcataattgctaaaatttccgccatggatgccgaaagtaagcagcttgctgcccaggtcgaggcgcagtctttgctcattagcgcgctgatgctcgctatcggcaaggaaggcggcgtcgcggaattagttagcagcgtaacgaaagcgataaattcggtactggaatcatctgaagacgttctgaagacggacgcagaactgcttctgaccaagtttcaggaacaaatagcgctcacgcagttgataagcacccacgaagatgaaatcagtcatgacaggcttgatgattaacaagggtcagtctgttatagattgggaatatgcagggcttgcggttagtcatgagcttaccggccatcagcaactattggccggttcagcttcaaaaaatagggatactccaggcggaatacgcaatgtctcctcgcctgcgctgctgttggaggcaaaccgctcggtacattaaggcaaatcaggcttcacttttccccaggccagcgtatgtcaccgacgccgttgactttcggcatggcaaataaaaatccctggaagcgtttaatacccgcagattcgagccagcaccactcctctatccgctctatgccttcagcaaccaccgcaatctcaagttcacggcagcagttgataatcgatcttaccaccgcttgtttagggccgctctgatggatatcggtaataatctcgcggtcgattttaactttatcaggctgaatttttgtcaacaacgagagtccagcataaccggcgccaaagtcatcaattgccagccccataccagagacgcgcagtttttttatcgcgctgctgaactggctaaaaccggagatcatttcatcttccgtcacctccacgatcacctgttcgggttcaagaccctgtttttttatttcctgcaacaggtattcaatggcatcaggaataacaaccagagacatcggaaggatattaatggatattttatggtcgccaatattgatttctttcgccagggcaaaggcaactgatttcgctttgagatcaactttataacgttgctctggcggaatcgaggcaaagaaattggcgggactaccgccgtctttatcacgaataagcgcttcaagcgaagtgatattcccggccaacggttcgataatgggctggaaagcaaactgacagcattgaccggcaaaaaacgattcttgcggcgcatgaaatgcatgtttacgcgaatgaagcgaccatttgtcaggccgtaaaaagggtgacggcgcggcagcgcttttttgactgataaaagtatggataaatttatagacgcgctcttcggtggaaagataacctttcagttggctaagctggcgaacctttgtcaggacgtcggcggtttgcagtttattcaggtcaaaaaacatcatccctacgttttcgaagcgccggcgcggcgcgtaatcacgcatcagctcgacaacctgatggtggcgatcgtcttgcttgatcgtgctgaatagctgctcaagcacgcactcatccccctcaagtatctgaaggtaaacattatcttttaaaagaagtatgcccgtaatcccgcgtgctgcgttctcagcattcgctttttcaaccagcagtatgagatcggtttcttgtgttaaatgcatctgacttctgtaaatcagagttgtcagcataatcccatccagatgtttgccaggagaatgggactgtgtaacacagtttacccttttaacccaggctatctgtcataattaactggaccggctgtagccgactaagtttatccgattatttacggcagcaaccggcaagggccagcgaaataatcttcagcggcgcgggtaatggcagtgattcattcagcagccatttaaaccgtttggtaaatgcgtttttttaagcggtatttactagccaacaaatccctgctcgcgcatacgcgctatcgcctcttcgctggcgcagaccatgcccgtggtcagcgtttcaaaaccaaagcggcgataaaagccgactttatccaccaccgagtagatgaaggttttgccgaacggccgcagccgatcgctaaccgattgcatcagctgctgcccgtacccctttccctgacagcgcgggtgcaccgcgacatctgccagatagctgcaccaggtcaggtcgctaatcgcccgggcaacggcaataagctgcccgttttcatagccaaaccagcaaaaggtactatggcgaaacgcgcgctccaccagcgcgacgtcccgctgattgagacctgcggcggcgataatctccgccaccgtccgccagtcaaccgagtccacgtgctctttatcttttaatatcatcatgacgttgcctttcactcgcctgctttggctttcagcatagccgaatggcgctaaaaaaagcgcgccctgccgcccccggtcaacagcattttatgctggataaaaaagtataagccggggaaattttctgacaccgcggcgtgaaaacagcgcatttatgcttaacagcggcgagtaatcgaccaggaggcagaattaaataaaataacgccatattctaacgaccgaaaacgggcaaaaaaaaaccgccatgtgactggcggtgaatgaatgcttgcatggatagattgtgttttgcatttttacgttcagggcataaccccctgagtacgcttgtccgataagctatcacgcgcaacatcaatgaaagctaaacggaccgttgcttacagcttttccaccagcgctttgatctgcgcgacaagaccctcttgctcctcctgcctggcgcccgcgcagggccaggtggattggcggataatcaggcgcgtcggcagcagctcgcggatcttcatctgcggggcagccattagctggatgagcagctcaaccgccctttttcccagaacgttaaaatcctgggcgacggtggtcagcggcggctggaagtagaggctgtcagcggtatcgtcataaccggtgaccgagatcgcctggctgccggtgcgattcaactgcgccagcgcgctcagtaccccgagcgccatctgatcgttagccaccacgatggcgctaatgcgcggatggtgatgaaggagctcaaacgttttgttccagccgctggcggcgctccagtcgccaaacaccgtcaccgcattactgacgcccagccgatgcagcgcctcgcgccagctgctcaatcgcatgcgcgcggagaccgagctctccggcccggccagcaggccgaactcccggtgcccggcgtcccagagatgccgcacgcacgcgccgcagccgtcgcgatgatcgaaacgcacgcagcacacgtcggtctccggcgaaacatcaagaaacatgcaggcgatatcggggttttccaccaccagccgctccgcgaggctgctttcgagcggcaggctgataatcgcgccgcgaatatgctgggcgcgaaactcattaagccgcgcctgcagcgacggatagtcgacctgcaccggcatcgcaatcgagacctcaagctgatgcagaccggcgtagcttttcaccgccgcggcgatttgtgaaggcgcgtgcagcgtcagcgaagcggttatcagcccaatcgacggcgcggatttccccgccagcagcttagcggaacggttcggtacgtagcgcagcgcctgcatcgcgcgaatgaccttatcgcgggttcgttcagacaccacgtccggattattcagcacccgggagaccgtctgctgagacacgccggcctcgcgggccacatcgtcaagcgttgccaggcgacgctgcatagtgcactccttctgaattaaaacctcaatgtcgtccgctaacattttatgtttaaaagacgacaaaaatcagctgtttttccagcttttcgtgatcgccagtgggtttcattttcgccaatattgcggctatagcgaaaataactgataacaaaattatattgtctagcgaatgacatttttatcacttatccgtcaggaatacgtatgcaacaacacgactctcattccgccgcagcagcaacgttccatcagattctcgcccgcgaagactggcagaaccagaccattacccatctcaaccgtttaccggcccacccgactttcgccagctggcgcgataccgacgcggcgcggaaaaaccagccctcggcgttccgccgccggcttgatggccagtggcagttctcctgggcccgcagcccgtttgacgtggatgcccgctggctggaagacgatctgccggacagccgcagtacgccggtgccgtcaaactggcaaatggaaggctacgacgctccgatctacaccaacgtccgctacccgatcgacactacgccgccgcgcgtacctgaggagaatccgaccggctgctactcgctgacgttcagcgtcgatgagagctggcgaaccgacggccagacgcagattatcttcgacggcgttaattcggctttccatctgtggtgcaacggcgaatgggtcggttattcgcaggacagtcgcctgcccgcggctttcgatctctcgccctaccttcagccgggcgataaccgcatctgcgtgatggtgatgcgctggagcgcgggtacctggcttgaagaccaggatatgtggcgcatgagcggcatcttccgttcggtctggctgctgaacaaaccgaccctccacctctgcgacgttcagcttacgccgcagcttgatgcgctctaccgggatgccgagctgctggtgaatttaagcgtcgccgcgccggtcgcgctgctggaggcgctgacggtgaagatcgaactgtgggatgacgatcgtctggtcgccagccaccagcagttgccgggttcgccgattatcgatgagcgcggaagctatgccgaacgcgcggcgattcgtctgccggtagagcgaccggcgctgtggagcgcggaaacgccaaactgctatcgggcggtggtgtccctgtgccgcggcgatgaaacgatcgaggctgaagcctgggatatcggctttcgccgggttgaaatcaaaaacggcctgctgctgttaaacggcaaaccgctgctgatccgcggcgtcaaccgtcacgagcaccatcaccagcgcggccaggtggtgaccgaagaggatatggtgcaggacatcctgctgatgaagcagaacaactttaacgccgtgcgctgctcgcattatccaaacaccccgcgctggtacgagctgtgcaatcgctatggcctgtacgtcgttgacgaagccaatattgaaacccacggcatggtgccgatgaatcgtctttccgacgatccggcctggctgccggccttcagcgcccgcgtcagccggatgttgcaaagcaatcgcaaccacccgtcgattattatctggtcgctggggaacgaatccggcggcggcggcaaccatgaagcgatgtatcactggctgaagcgcaacgatccctcccgcccggtgcagtacgagggcggaggcgccgacagcaccaccaccgatattatctgtccgatgtacgcccgcgttgagcgcgatcagcggattccgacggtgccgaaatgggggatcaaaaagtggatcagtctgccgggcgagcagcgcccgctgatcctctgcgaatacgcccacgcgatgggcaacagcctcggcaactttgctgattactggcaggccttccgcgactatccgcgcctgcagggcgggtttatctgggactgggcggatcaggccatcagcaaaaccttcgacgacggcagcgtcggctgggcctacggcggtgattttggcgatacgccgaacgatcgccagttctgtatgaacggcctggtcttccccgaccgccgcccgcacccttcattaattgaagcgaaacacgcgcagcagtacttccagtttaccctgcttgcgcaatccccgctgcgtatcagcatcagcagcgaatatctgttccgcgccaccgataacgaagcgctgcgctggcaggtccaggccgccggagaaacctttgccgagggtcaagtgaagcttgagctgagccctgaaggccagggcgagctgacgctgtgcgatgcgctgacgctgcccgtgggcgccgaagcggtgtggctgacgctggaggttgtccagccgcaggccaccgcctggtccgacgccgggcatcgcgtcgcctggcagcagttcccgctcgccgccccgctggcgctgcgccggccttcccccgtcggcacggcgccagcgctggagagcagcgacgcggcctggaccgtacgcagcggctcgcagcaatggactatcgaccgggagagcggcctgctgacccactggcaggtagagggtgtggaacagctgctgacgccgctgcgcgaccagtttgtgcgcgccccgctggataacgatatcggcgtcagcgaagtggagcgcatcgaccccaacgcctgggttgaacgctggaagagcgccgggctctacggcctcagcgcccgctgcgtacagtgcgacgcccagcgcctggcccatgaagtggttatcgatagccgctggcactatctgcgcggcgacgaagtggtgattgtcagccactggcggatgacgtttgatggcgaaggcaagctgcatctggcggtcaatggcgaacgcgccggcaccctgccgcctctgccgcgcatcgggctgaatttccaggttccggaccagcatcaaccggtttcctggctcggctacggcccgcatgaaaactatccggaccgccgcaccagcgcctgtttctcccgctggcagctgccgctggaagagatgaccacaccgtacattttcccgacggaaaacggcctgcgctgcgataacaaagcgctggactgggggcgctggcacgtcgcgggcgatttccacttctccgtacagccctacagcaccgagcagttaatggagaccgatcactggcacaggatgaagccggaaaacggcgtctggatcgcgctcgatgctcaacacatgggcatcggcggcgatgactcctggacacccagcgtactacagcaatggctgctgcttgagacacaatggcaatatcagttaacgattcatttccaataataatcgggggcgccagcccccaaccttacaggcataataatatggaatattcacaatgaaactctctgaactcgcgccacgagaacggcataattttatatatttcatgctgttctttttcttctactatttcattatgtcagcctacttccccttcttcccggtgtggctggcggaagtaaaccatttaaccaaaaccgaaacggggatcgtcttctcctccatttcgctattcgcgataattttccagccggtgtttggcctgatttccgataagctcggcctgcgcaaacatctgctgtggacgattacgattttattaatcctgtttgccccgttctttatttttgttttctctccgctgctgcagatgaatatcatcgcgggcgcgctggtgggcgggatctatctggggatcgtcttctccagcggctccggggcggtagaagcctatattgaacgcgtcagccgcgccaaccgttttgaatacggtaaagtgcgcgtctccggctgcgtcggctgggcgctgtgcgcctcgatcaccggcattctgtttagtatcgaccccaatattaccttctggatcgcctccggcttcgcgctgatcctcggcgtgctgctgtgggtctcgaagccggaaagcagcaatagcgccgaggttatcgacgccctgggcgccaaccgtcaggctttctccatgcgcaccgccgccgagctcttgcggatgccgcgcttctggggctttattatttatgtcgttggcgtcgccagcgtctatgacgttttcgaccagcagttcgccaacttttttaaaggcttcttcgccagcccgcagcgcggcaccgaagtgtttggcttcgtgaccaccggtggggaattactcaatgcgctgatcatgttctgcgcgccggcaattattaaccgaattggcgccaagaatgccctgttaatagctggggtaattatgtcagtccgaattttaggctcctctttcgcgacctcggcggtggaagtgattatattaaaaatgctgcatatgtttgagatccctttcctgctggttggcacctttaaatatatctcgtcggcatttaacccaaaactttcggcgacgctgttcctgatcggctttaatttatcgaaacagctgtcgggcgttgtgctctcggcgtgggtaggacggatgtatgataccgtcggcttccatcaggcttatctgatcctgggctgtattaccctgagctttaccgtcatttcgctgtttaccctgaaaggcagcaaaaccctgctcccggccgcagcataacgccaggccgccggaaaccctccggcggcgcgtcggcaatacaccgttaagacgccgggtaaggctgttgccgctagccggcgatccgcgtttccccgtcgctattttccagcccgtaaaggcgcgcttccgccatcgatgaaatcagctcagccagctcggtggagtggctggttaaccagatttggctatagcgggacgcttcgacaatcagccgggccagcgccgggaacatctggcgatgcaggctgttttccggctcgttaatggccagaaatgccggagggcgcgggcttaatagcgccaccgccaggcacaggaagcgcagcgtgccgtcggacatttccgccgccagtaaaggccgccagacgccgttacggcgcatcttcatcgagaaacgcgagttttcgttttcacaataaaaggtacacgccgggaacgcttcgccgaggatctcatgcagcagctcttcggcgccgatttccacgatggtctgaaaggcggcggcgaggttgtgcccatcgctgtcgagcaccggcgagcggtagcctaccgtcgggtgtcgcagcggtgagagtctgccaatattgaattcgtgataaaagcgccagtggcgcatggtttccctgacccgcgagacctccggaaaacggtgcggctcgcccagttggccaaaaatcgattcattctcgtaaatggcgtcggtaaaagtactcttttcgccattcacatccaccaggaacgccgcctggtttttacgttccagcacgcgcgatgaaggacgtcgggaaaatcccgccagccagatcgactcctctttaacgattggatccagctgaaactgggtaggataaggcagcttttccggaaaacccacctgcagctggtagtcaaactcgtcggtcagacagccaatctgcagccgccgcggaaagcggtcggtcggcgcgcctggcccggaccacataatgttttccagcccgccctcatcgctgatatagccggaaaacttcccgtcggcgcaggcggttaacaggtggatggctttatagatattggatttaccgcagccgttggggccaaagacgatattcagcgcaccgagttccagctcaatatccctgaccgatctgaaattttttatccggatatggttaatcatagattcccgaaactgataaaagcgtttggcgctactgtatcggatgcgaaaggaaaacaaaacaggcgcggaccggacgactgcttgccgcccggctccggcttagctgaagagttttttcatgccgcgggtcagcgcgactcttttgagtttgtccgtatcctcatggctctcgttgaaaacgccgaaaaaatagcgttcatcgtcgatagtctgcgatacgattctgtagctcagcggctggccggatttcgcgccgtactgcgcaggcgtcacggaaatctccgtcgcgttatcggcaacgctaaccatcaggccgtcgcccttccctccaaccagcatcaccttaattaacgggtgcaccatgtccctcccgggttgaggtcaatgattaattttcgatggccgcaggctgacagttggccgttgcgccgccgtggccggacttgtctttagcggaggccggctgagcgccctctttaccaacaacgggcggtaacggcacgccttctttgtccaccgcaggcgacgccttctggcaggtcgccgttttcgtggcctctgcgctccagactggggtttgcagactcaggatcgccacgggagcaagcagcaacgtgttcttcagtactttcttatagttcataccggccttgagtaaaaaaatttctttcttatgctgagctaagcgctgattattaggagtaaaagctgacaaatgatgaaggaaaaaagaggaattgtgaacatcaatagttcttatttatgaattgctgcctttcctgcccccgcgcccgacggatcttatatctaagaattaccttaatcaattgaaatgacggcaatccccccattctggtgacgtttttttttcgccagagtgtagcacttttgtggcagaaactgcagcctggtttatatcccggacgttgtggaaaattcctggagtgaggctcgccgacggctgagcatttgtacttcgcttgttagccactagacttaaataagtcaaacgaaaggagactcccatgtcatcacaagagtatgaaaacgacgcgcagaatctggcggacaaagtgagcaacaaagtcaatgaattcgccggggaagcccagcagcaatttggtgatgcggttgattcgcctaaacatcagctaaaaggcgcggcccgtaagtacgccgctcaggcgtcggatgccgtttcagaggtctccgagcgcgtaagggaaaatccgctgaccgggctgctggcggccggcgctatcgggctggtgattggtttactggcgggacggaaataacccattctaaggcccttcgggccttaattttttgcctccggcgcgcttatgctaacgctgactcaaatcgccacgacttcagctacgtcaaactgaaaaacgtaagggtcggacaacaggtggaattgctcatcatccgcataggtcactgcgacatgatacgcttcaccggcaaaggcgatgaccgcatccagattgtgccagtacgttgccaggaagaagtgttcccactccccctgcgtttcccgtctgacaaatgcccccgcgttgccgctgatgccctgggaatgctgtacgcctgtcgcctgcaaatgaaccgcaaacgcatcgccaaactcaacgggaacacaaccatgccaggttctgacaatcatctctacacctcataaaaaatcaataaagatgcatttatagcaaacaaatggcgataatagtgattttttatgcaattgctttatgcgcatcataccgcctggtacatcccggacatttgcaggtataatctcactcattattcagcggattcagacacgaagatgacaaaactcaccttacaagaacaaatgcttaaagccgggttagtgaccagcaaaaaaatggccaaagttcagagaacggcgaaaaagtcccgcgttcaggctcgcgaagccagagaagcagtggaagagaataaaaaagcgcagcttgagcgagataagcagcttagcgagcagcaaaagcaggcggcgctctcgaaagagtataaagcgcaggttaagcagcttattgaaatgaataaaatcgatatttcaaaaggcaatattgattttaacttcacggataacaacttcattaaaaaaatcgccgtggataaacccacccaggcacagctgattagcggccgtctcgccattgcgcgtctggccggcgataacgacggcgagagcaaatacgcgattatcccggcaagcgtcgccgataaaatcgcccagcgcgacgccagcagcattgtcttaaacagcgcgctaagtgcggaagagcaggacgaagacgatccgtatgctgattttaaagttcccgatgatttaatgtggtaagcaatgcgggcctgcgcagaccggcgattcaggcctggtctgcgcaggcgttgtgctttacactgcgcgcggcaaaaattgagtagataaacgattaaccaggcggtaacggcgatgaacggaacgatcacaacgtggtttaaagataaaggttttggatttatcaaagatgaaaacggcgataatcgctattttcatgtgattaaggttgccaaccctgaactcattaaaaaagatgcagcagtcactttcgaacccaccaccaataacaagggtttgtcagcctatgcggtaaaagtcctgccggaaagcaaatatatctatattgcaggcgagcggattaagcttacatcgatcaaatctttcctggtgtacagcgaggaagagcccgccgatgcccgcatcgacaaagagaatgcggtcctttccgtaggcctgttgatgggaaacatcaggccaaaatccaccgctaagcctggcgaaatgcgctcggtgaaaaagctggccattaccaccttccagggaaccaccctcatcttttcggaagatgagatagacattgaggccacggtaaaactgcttaaggtgtgaaagcgtatggctcaacaaaccgggctctgcgcccggtttgggagtgatgacaaacctgtttaaacatcttccccggatcttcaccgggtggcggctgacgccttacccggcctgccaataccagagtcacaacctgccgcgcaatttctttggactcgtgcaagcgaagcaccgttgggtaattccagccgttctgttcttatccgcaatgggacgccgggatctgcgtcctttattaaccagataattttccctccctcagccaatatccacctgcctctcggtttattccagtcgcgctcgcgttatgcccgtaaaacatgacgcaaaatacgctaatccgcgttagctgttaaaaaggttattattaccctaaataattcgagttgcaggacaaggtactcgtgccttgaacagcgcttacgctggccccaaggggcgaagccgcaggccgagtaacaaagccaacgcacaggcaacttgaagtataacgggtatataccgcacaaagtgaacagcatttacatcatcgtcatttatcctgttagccgtaaacaaaatgggtgatattaatgactgtatttaaaagcttgctcttctttcttggcgcggcttctgcctgcgcattcgtggtattgtgcctttgggtcgatatccacttttgggattataatatttctgaattatcactcaccgaaattgtacaggagctggttttaacggccatcgtttttattcattttcggcttgcgaagcagtataacgccatgcgctactgtcatattcttgttggcggctttttccttgccatgctcattcgtgagctggacgccctttttgatcttatttctcacggcagttggctgtggtttgcgctgactgcagccctgttagccttaatttatccacttatccattatcgtcaaaccctggcacagctggcgcaatatacccgtacaccctggtacggcgtattaatcagcggcctgttggctattctggtcttctctcggctcttcggcatgcagggcttatggcatgcaattctcaatgatggatatgtcagagtggtaaaaaatgtcgtcgaagaaggctgcgaatcatttggctatatgctttgtctcaccgcctcttttggccattatcgtaattttcgcggaacctggggcagacatcatattgagccccgttgataccctgttttcatttgccttgcgcacggtgatgagtgaggtaagtcctaaaatgttcccggcggtaaacgctttgttggttttgcccaaagcgcgaggctaaaattttgccgctatggtactgcctccatagcacattgctcacctgcagctcttgcatacggtttgcaggtgagcagccttatccgcagtaaaatttacttattcacattttatccgctgatttcttgatatatcggcgatccgttccataatgaagtctacgcacatcgcgcccttctttaggggatacgccagtagcagcacttttggacatgaccgcttctgcagctagcccccatccggcttgatcatcgacatctctcagaacagagtttttggatgttattcaatagctttttcctgtgaagtcagaaacgcgttttctcaaaaaaatcttgaaatgaggatttaagcccatgaaatatgtatagttaccttgatatagaaaaaatcaaagccaatcttgagtggattgttaatcaatcttcagcaaactctgagatgccctccgtttccgatcgcaaaacaatctacagccttctggagctcatacagacctatgacggactgctggagttaattgcccaatacggaattaccgtagtcgataaggaaatcatcgaaggcttgtcccttacagaaaggtttatcgctaaggtcaaatcgaatgcgaatgcattttagccatgccctggcaccgcggttttccagcatcagttcactcttaacagcgcgctcgcgccactggcgataaagcgcagttaaatcaaaacccgtgccgcgagacaaaatggcctcgcggaagcgctggccctgttcgtgggttaaaccgccctgctcaacgcgtcccggatagctacgcggtggaagtatcaaatcaacggcatgcatgccgttaaatgacgaatagcgtctcgccctatgattcaatggacgccgctaaagattagctttggatgctatattcataatgattttctgaatgattgccattaattaataaaaaccgtgaatgcaaattaatagtggcataacaaatcttggcatttagtgcgattaaaaatgctgaaaaacaaacaaatcacctacacaaagtactgatttggctgcgaatttttattaaaaagtaaatctgttctttcttaaaacctattgccattatattaaataagaaatatcctaatctcatcaggcgttacttaaataaaacatcatacggcggtcgaaattttttcctccgtctttttaaaaataagaaaatcatgctaaaaatcgccatcattaccaaaaacatttatttagaaaaggccatagaggaacttacccaagaaatttccagcaccaaaggcataggcgacctttgtttccaaagaaacaacatacaagatcacctcacaaaaccagacataatttttactgagatggaggttggcgagtatttattatgtcaggaaatgaaaaaatacaaatcagagtgtccagcggtggtaattttcaccaaaaaagaaataacgtttaatccttgcctgctgcctttatgcgttcaaaatgctgtcattttatttcataaaaacagccttgaaacaatcaaaaaaaacctgtctattctctttgatgaatttatcgcgggcgataagaaacgtataacgatagagaagaatcgctgtttaaaatgcccgcatcagtcattgagtcgttcgcaactaaaaatcattaatgccataaatcttggccttaacaataatgaaacagcaaaaaacctgggcatcgatcacagaaccgtatactcccataaattgcgaataatgaagaaattccagttagaaaacaaccaggagcttatcagattctcttccatcgttatgagaagaacatctctctattttaattgaatttcatacgcttgcttttaaaactcaacttttgcttttttctgtctttaaaatacgaaaatccagaaatcagtgaaaccagcaataaaaaaaccgcgaataccagaagcaatatattagccatactcaatccgttcaataaaagatatgcaagagataagacagatgatagagtgaaaaacattcacagagcaagttcgcttattaaatttaagaaatccatgcaacaatgtaagtaaactcctaatattgcaaggaagctatatttaatatattaatattatttttcgctaaaaaacactttatgccgggcttcatgtttttatgcaaaagtggccagcgcgtcgatgcacgggattaccataacaggacaaaccattccgagggcgctaaattgggcggagacgttttgcagagtttggggaaggaaaaattggataaaaaaccgggcgctgcgcccggtcttcttctactcgtcaaaacgcgcgactagctcagcccgcggttttccagcatcggttcaatctgcggatcgtgtccgcgccactggcgataaagttcagctaaatcagtgctattgccgcgagacaaaatcgcttcacggaagcgctggccgttttcacgggttaaaccaccctgctcaacaaaccactggtagccgtcatcggccagcatctgcgtccacagataggcgtaatagcctgccgcgtagccgccgccgaagatatgcgaaaagtagctgctacgatagcgcggcggcacggcggccagatccatattctccgcacgcagggacgcggcttcaaacgcatcaacatcgtccgggagtttatcctccctcacgctatgccagtgcatatccagcagcgccgctgcgagcagttcgctcatgtcgtagcctttattaaacttcgccgcgcggaacatgctgtcgcgcagcgcggccggcatgatttccccggtttgatgatgccgcgcatagtgggcaaatacctgcggctcgctggcccagtgttcataaatctgtgaaggaaactcaacaaaatcgcgcggcgtattggttcccgacaggctggcatacttctggctggcaaacaggccgtgcagggtatgcccaaattcgtgaaataaggtgatgacctcatcccaggaaagcagcgcgctatgtccggctttgggtttctggtagttacagacgttataaattaccggatgctgcgcacgcagggtggattgttcaacaaatacgcccatccacgccccgccgcttttgctgtcccgcgagaagtagtcgccgtagaacagcgcaattccctctccgttagcgtcgataatttcccatacctgcacgtccggatgataaaccggaatatcgaatcgctcgacaaagcgaataccgaacagctgtgtcgccgtccagaacacgccgtcgcgcaggacgcggtcgagggcaaaatagggcttgagctgcgcttcatcgatggcaaatttcgccctgcgcacctgctcggcgtaatagagccagtcccacgccgccgcgcggaaatcaccgccttcattatcaataacttgctgaatatccgccagctcctgctcggcccgcgccttcgccgccggagcgattcgccgcataaaggcaaacgcctctgccggatcgcccgccatctgatcggccattgaccagctggcgaagtcatcagcgcccagcagctgcgctttgcgcgcgcggagctccgctagccgcagtaccagctcgcgagtgtcattcgcatcgcccttctgatttcgcgtccagcctgctgcaaacagattctctcgcgtctgccggtcctgcagcgaaaccagcgcgggctgctgggttgtattgagtaaaggcagcagccagcgcccacctaatcccttctcctgcgcggcttctgccgctgcgcttatttcatcgtcgctaagccccgcgagctgatgagcgtaatccaccaccagaccgccagattttaccgccgccagcaggcgctgctgaaactggctttgcagcgctgccgcttcggtattcagcgcgcgaagcgccgctttttgatcgtccgcaagcgtggctcccgcaagggtaaagcgttgccaggtcacctccagcagacgtcgggattcggcgtcaagggagagcgactctcgccgctcccacacctgcttcacgcgttgaaaaagggcatcgttgagccagatatcattcgccagttccgccagctcagaggaaaactgctcatcaagcgcctgaatggccggattggtctccgcgcccgccatagcgaagaagacgttggttacccgagccagcagctggccgctctgttccagggcttccagcgtgttggcaaaatcagccggctgcgggttattcgcgatagcggcaatctctgcgcgctggcgacgaacgccctcgtcgaaggccggacggtaatgactcacgtcaatcaaatcgaaacgcggcgcctgataaggcagcagactgacgctaaaaaaaggattgttctccgacatcttcatctcctgaacacgattattctgtaagattaggcaactcattgattgaccgcaatgattactctgttcaccgccgcgttcggcggagaggtctggtgatttccattacccgtcgccgggatcgcgtgctatggtatgaagacacaaaaatcgttgaggaacagtaagatgattatcctggttaccggagcaacagcgggttttggtgaaagcattactcgccgttttatcgctaacggtcacaaagtgattgccaccgggcgtcgcgaagaacgcctgaaaacgcttaaagatgagctgggcgagaacctttataccgcccagctggacgtgcgcaaccgtgcagccattgaagagctgattgccggactgccggcagactggcaggcgattgatgttctcgtcaataatgccgggctggcgctgggactggagcccgcgcataaagccaacattgaagactgggaagacatgattgacaccaataacaaagggctggtgtatatgacccgcgccgttctgccgggtatggttgagcgtaatcgcggccacgtaatcaatatcggttcggtcgccggcgcctggccttatgctggcggtaacgtctacggcgcgaccaaagcgtttgtgcgtcagttcagcctcaatcttcgtaccgaccttcacggtaccgcccttcgcgtgaccgatattgagcccggcctggtcggcggcaccgagttctctaacgtgcgctttaaaggtgatgatgctaaagccgagaaagcttacgaaaatactcaggccctgactccggaagacgtcaccgaagcggtctggtgggtcgcaaccctgccaaaacacgtcaacattaataccctggaaatcatgccggtcagccaaagttttgccggactgaacgtgcaccgccagggctaagctctgtaacccggcccgcgggccgggtctgggctggaaggcaaaaaacgcgtaaaatagcgcaaatacctcatataaaagtaatcatccatggccgcagaagcacacctgaatccgacacagcccgttaatcagcaaatttatcgtatcctgcgtcgggatatcgtccattgtctgatcccgccaggcacccctctttcggaaaaagaagtctccgtgcgctttgacgtttcccggcaaccggtacgcgaagcttttataaaactggctgaaaatggcttaattcagatccgtccgcagcgcggcagctacgtgaataaaatctcgctctcgcaggtgcgtaacggctgttttgtccgccaggccatcgaatgcgccgtggtgcgacgcgccgccggaatggtgaatgatgaacagctctaccagcttgagcaaaatctcaatcagcagcgtacggcggtggagcggcagcagttaacggattttttccagctggatgacgaatttcatcagaagctctcgcaaatcgccgactgccagctcgcctgggataccgtcgagaatattaaagccaccattgaccgggtgcgctatatgagcctcgatcatgtgaccccgcccgatatgatgctgcgtcagcactatgatattttccagccgctggtcgcccgcaatccggatgcggttgaaaaagccatgcgcctgcatctgcaagaaattagcgagtccgtgctgcttgttcgtcaggaaaacagcgactggttcagcgaggaataaaacgagttgcggcagaacaggttatctgccgcgagagattgatgatgactcttacctgacaaccagaaccggtattttagcgtgacgtaaaatcgactcagcgtttgaaccaagaagatgagtggatatacccggcttgcgggaaccaataacgataacgtcaaaatcctcattgccgctcaccgccagaatttcatcgcgcacgttgccaaagaccactcgggaatgaatccgcccggcgggaatggagaacagacgggatattgtcttcatctttttctcagattcctcacgcatataggcctcaaacttacgtatatcggccgcaaaaccgcgtaaaattgagctgctgctgttcggcagaacgttgagcagcgtaatctccccttcatccgctgatgctaaaaactcagcatggcgaaccgctttgtcacttaaatccatttcaaaaacgtctacgggcagcaaaatttttttgtacatagtccgttctccttttttctgaggaaacttagtaagttaactcatcatgccatatttacttcaccaggagaatgaataatcatccagataaatatttaattcattaaaataaacatcagttatttatacttaactgttgttagataaagttatgtatattcaacgatctggatcaaagattgcgcctgacgggaaatatatttctggcgggaaaagcgttcagggatacagcatgagggcaatgccgccgggaccggcggcacgcgggtgaaataaattagtttgcctgagcccaggccgctacggtcgcttttgcgccgtgctgctgcagggataaataagcgcgaaccaccgcgttcacgaaacggctctcctggggcagactggcaccgaaaatagcctcaatacccagcagtgcgcgcacgcgttcttcgccgtctgcgctattctgtacggtttgcgcaatcaccggcagtaaaggatcggagatttcaatcgcctgcccctggtcatccaccccgctgacatagcgcatccaggccgcgacgcccattgccaacagcgtaaagtcgccgccatgcgccaggtgccagcgaatcgaatccagcatccgctgcggcagtttctgactgccgtccatcgctatctgccaggtgcggtgcttcagcgccgggttgctatagcgctcgatcagcagaccggcatagcgtgccagatccacaccctgcacgttcagcgtcggcgcctgctcctccagcatcagcgcacgcgcggcgcgacggtagttttcgtcctgcatacagtcattaatatgctggtatcccgccagatagcccagccaggcaagaaacgagtggctgccgttcagcatgcgcagcttcatctcttcaaagggcagcacgtccgacaccagctcagcgccggctttttcccactgcggacgaccggcgacaaagttgtcttcaatgacccactgacgaaacggttcgcaggcgacgccagccgggtcgcgaacgccggtgagctgttcaattttctccagcgtttcggcagtcaccgccggtacgatgcggtcaaccatagtagaagggaaagtgacactgcgcgcaatccactcggctaattcggcatccacggcgcgggcataggcgcagacgacattacgcatgacgtgaccgttttccggcatattgtcgcaggacatcacgctgaaggccggcagacctgccgccttacggcgtgccagcgcttctaccaccacgcccggcgcggatttcggttgatgagggttttgcaaatcggcaacaatcaacgggtgatctaactgcagttcaccgctggccggcgagtggcagtagcctttttcggtaatggtcaatgacacaatagcgacctgaggctcgcacatttttgccagcacgctttccagaccatcgacctgggcatgcatcgcctctttgaccacgccaacaatgcgggcggtccaggcatccgccgacatttcggcgacggtgtaaagtaaatcctgctgttgcagatcggcgatttgctgctcgccaccgatcaggttcacttcggtatagccccagtcgctgccgtgttctgtcgccagaatatcggcatataccgcctggtgagcgcgatgaaatgcgccaaagcccaaatgaacgatgcgtggaataagacggttgcgatcgtaagctggcagcgtggcgttcgctgttaatagcatatgttccatggtggctctcatatttatgatttctggatccccacggtaagtgggtaccggctggtgaaataaaccatctcatgcaattggtatgatatctttgacttttatcaactaccatacaagaagatgggcgagttatactttcggtatttctgagaataaaagagtgaaaatgccgggctaatggcccggcataatgttatttacggcgatcatcattcggtgcggagtttgtgttttttaaatatattgcccgttacccaccgctttattctgcggcgcgcagtctgcggcgtcattcagcaagctcagatcgcggtcacgcacttcaggcatcagaatggcggaaattaagccaatgatggagtagcacaccagcatcacaacaatgggcatccaggaaccggtcatattgcagaaaataccggccagcaccgggccaaagcctacggcgactaatccccccgcctcttttgaaattgccatgcgggtaaagcggttacgtgagccgaacatttccgccatggtgatattttccagcgcaaacagacccaataccgcgatattatgaatgacgatcagtgacgccatgatggtgctcgcgctatagctcttatccacaataatcgacagcatgggatacgccagaataatggctgaaatattaatgataatatagggtaagcgacgccctactttatctgacagccacccaaggaatgggatagtaataaagccgataacagagctaatcattaacgcatcggtagggatagctttatcaaacagtaatgtttgaaccagatagcccgcgaggaaagtttgcaacaatcctgaatttcccgcctgtccgaagcgcagacccgtcgccagccagaaggacttacttttcagcatggcgctaaaggttccttcctgggtcgctatctctttctgcaggacgctgtcttcgctcactttctcaaaaaccgggctctctttcagattgagacgcagccagatggcaaagatcatcaccactacgcttgccaggaacggcacacgccatccccacgcgacgagctgttcacggtccagcacgaagaacatcaccgcccagatagccgtggcgcttaacgtaccgcagttggtgcccatagccaccagcgaagagataattccacgcttacctttcggcgcatattccgccagcatggtacccgcacctgatatttcggccccggcacccaacccctgaataatacgtaaagtcacaagcaacaccggcgctaaaataccgacctgggcataggttggcagcacgccaataagcgtggtacagatccccatcatggtgatggtaataaacagaaccttcttgcgcccaatactgtcgcccattttaccaaaaataaaggcgccgacgatccgcgcaatatagcccgcgccgtaggttcccattgccagaatcagcgccatggcggcggattgctccgggaaaaaaatctcatggaaaaccagcgctgcgccaagggaatagagttggaaatccataaactccagtgccgtgcctaaccaaccagatacggctgcacgaatgagatcggaagtggttctctcattttttacggtagtcataatgattatctctaattgtagaatacagagtccgcacctgttgttattggctgaaggttaataaaaccttacagcaacgtttcctgtcattttcaaaaagctccagtgcatcgataacatgttgataagcaaattgatgagtaatcagctcctccgggttaattaagccttgttccagccactttatgaccaccgggaatttattggcgttaagacgcgacgagaaaatagagagctccttgccggtaataccctgctgtgcaacctgcgaaggctccgtcgagaatcccattaaaacaattctcgccgccggagaagccagggtgaccgcctcttgtagaatcgagggatgacaggccgcatcgataatcagcgtcggtagtaccccctccgccttcagcgtatccgtcagaggcacgacgctgttattaatcacccaatccgcgccgttacgctgggccatctccaggcgttcatcaatgcgatcgaccacgatgacctgcttaacgcgatacacccgcttcagcacctgaatggtcgtcaggcccattggcccggcgccgtagaccagcgcgatatcctggtcggttggcgaaacgtgcccggtaacgttggccgcgatagtgaagggctcaatcatcaccgcatgtctgtccgtcacgttgttcggaacctgccaggcatttttcgccggcaccaccgcgtactcgctaaaaccgccatcccgatgcacgccgagcaccaccaaagaggtgcagacgtttggtttgcccaccgagcaaggatagcaatggccgcagctgatgaccggatcaacgctgacccgctggccgatggctttgtcggtaaccccttctccgatggcgtcgataacgccaaaaaattcatggccaataacgcgcgggtatttggcaaacggattgtggccgcgataaatatggctatcggaaccgcatatccccgccagcttaatttttacccgcacttcgcccgcggcaggctgcgggatcggacgctcttcaatcaccagttcgttgggctggcgaatcacgatacttttcattttgacttccttctttaccagttccacaacgtgccgtcttccagacgcgctacaggcaaataggccggttcataggggtatttcgcggccagtttttcatcgaactcaattcccagccccggtttttcacccggatgcatatagccgttatcaaacgtccagctgtgcgggaagacttccagcatctgttcggaatagcccatatattcctggacgccaaaattcggcacccacaggtcgaagtgcagcgcggccgccatgcagaccggagaaagatcggacggcccgtgtgaaccggtgcgtacctgataaagcgaggcaaaatcggcgatccgacgcatccccgtaatcccgcctgcgtgggtaatggtggtgcggatatagtcaatcagctgctcttcgatcagctgtttacaatcccagatgctgttgaagacttctccgacggcaatcggcgtgacggtatgctgacgaattaaacggaaacatgcctgattctccgccggggtcggatcctccatccagaacaggcggtaatcttcaatactcttgccaaaacgcgccgcttcaatcggcgtcaggcgatgatgcatgtcgtgcagcagatgctcgttaaagccaaatttttcgcgtaccgcggcaaacagctgtggcgtaaaatcgagatacttctcggtagaccacagctgctcttccggccactggcctttggttgccggctcgtaggcctgccctttacctttcgccatcccgtaggtggttttcatccccggcacgccgcactgcacgcgaatcgctttaaaccccatctctttgtggcgcgcgtagtcatccagcacttcatcgatggagtgacccgtggtgtggcagtagaccatcacgccttcgcgcgaagccccgcccagcagctggtatagcggcatgcctgcggctttcgccttgatatcccagagcgccatatcgatagcggaaatcgccgacatcgtgaccggaccacgacgccagtaggcgcccttgtagaaaaactgccagatatcttcgatgcgatgcgcgtcgcggccaatcagctgcggacagagatgatcccgcagataggacgcaacggacagctcgcgaccgtttagcgtcgcgtcacctaacccgacgatcccgtcatcagtggtgactttaagggtgacgaagttgcgccccggacaggtgacgaaaacttcagcggcaacgatcttcatttctcattccttacttctgtgcggttagtgggtaaaagtaaaccatcagacctactaccatacaagtataacgatcgaaaaagacgcggcagatcacagtatctcatcggggataaaagcggcgtgaacagagaaagcgagcgagaaggcaggaagagatgggccgggacagcatcacctggcccggctcactcagtaaaagaggctatgcgcgtccccagccggccacaataatcagcatgccgcacagcgcaaccagcgcgccggcccaatcatagtggctgagtctgacgccatcgataaagcgcagccacagcagcgcagtacacacgtacaccccaccgtaagcggcataaacccgtccgcttgcctcggggtgcagcgtcagaagccagacaaaaagcgccagcgccagggccgtcggcatcagcagccagggcgtcgccccgcgttttaaccagagccagggtaaatagcagccaatgatttcgcacagggcggtagcaaagaaaagcagcgtggtttttaacatgcaaagcgtcgtaagttgaacaagcgttaacgcattctacgcaataatggccgtcgtttactctgttttgtcgggtatgccgtcgaaaggagatgtagtaaactcaatccaagggaatcgcttaaaggaaatcgtgatgaacacaacactgaacaaacgctggtgcctgactgccctgctggcgctgagcgcggtggtctttaccgcatcgtcattcgccaaaacggacaagctggtcatcgaatccggcgacagcgcccagagccgccagcaggccgccatggaaaaagagcagtggaatgacacccgcactttacgccagaaggtcaacaagcgcgccgaaaaagagtgggataaagccgacgtggcttttgacgcccaggacaactgccagaagagcgcgaacgtcaacgcgtactgggagcccaacaccctgcgctgccttgaccgccgcaccggtcgcaccattaccccgtaatgaatggcgcccgcacgggcgccacaatcaccaaaacttcgctataacacacaggtactcccatgactgacgcttatcacgtcaaactccgcccgcttgagcgcgaagatcttcgctttgtccaccagctcgacaacaacgccagcgttatgcgctactggtttgaagagccctatgaagcctttgttgagctttccgacctgtacgacaaacacattcacgatcagagcgaacgccgctttgtcattgaatgcgacggcgaaaaggccggactggttgagctggttgaaatcaaccacgtgcaccgccgcgccgagtttcagatcattatctctcccgattatcagggaaaaggtctggccacccgcgccgctaagctcgcgatggactacggctttatggtgctcaacctgtataagctctacctcatcgtcgataaagaaaatgaaaaagcgatccacatctaccgcaagctcggatttatggtggaaggcgagctgattcatgaattctttattaacggcgaataccgcaataccatccgcatgtgcctgttccagcaccagtatctggccgagcataaaccgcagggccagacgctgctgaaaccgacggctcagtaatagtcaatagtgcttttgatggtgtagtggcgggttaacgcaggctgcacgctgtcgtcgacaaccttaagctcgcagcttaccgggttgtcgtgactgtcgtaatcgcaggtctggcttacgttgcccagcgcgcggtcattgaaggtgctcactgcggtgtagtccatttttttgcgcggatcggatgacggcgttgaggccaccgtaaattgttcacctttggctatggtggttttgcccagcggatagccttctctatcgtagcggtacgtcgctgtactctccttgccgcgagcggtgacgacaaacccgttatcatcggtttcccaggagacccccgccgagggcatttccgccagctgacatttgccttgtaaacgcaggcgcttttcgtggctttgcgcatccaggtagtagttagcgtccagcaccaacgccgcgccggttttattctcccgatcctcaaatgccagcaggtcaaaacacccttcgctggataaacgccctttaacccacttcaccacctgatcgtgttcgtcatacagcgtctggctaaacgctttcaccggcccgcgcagcggatcgaactcaaattcgttagaaaagctggccatttccggggtgaaggcctgcggcgcgcccttttcatcgcaggcgctaagcgccccgacagccagtaacagcaacaaccgttttttcacgcgcgattccttttgtgcatagttcaatcatattagcaaatacaattgtttacaccacttctgctatgcttaagtctggataacgttaataaggagtttatgatgaaactatcaccctggctatgtgcggctctgcttctgggttcgaccgctgctttcgcggcgccggattcctgcgagcgggtaaaaagcgatattcagcaaaaaatcatcaacaacggcgtcccggaatcgggcttcagcctgacgatagtcccgaacgaccagcccgatcagcccggcgcacaggttgtcggccactgcgccaacgacacctttaaaatcatctatacccgcgacagcggtgcgcagtaacctcgccgaatgtctggagaagtcttatccctcggttgaccagggataagatctctctactccattttaagtatcattcctcactctccacgccgaccttacgaaggcgttggcattacgccattataacaaaatcatggagtgagcaatgtctaaccaggaacataccgacggccttacccgtcgaacgctaatcaaatcaaccgcccttggctcgctggctctcgccgccggcggtttatcgctgcctttcagcctgagtcacgccgctgccgcggtgcaagacgccgctcgcggcgaggagcgtatcgtctggggcgcctgttcggtcaactgcggcagccgctgcgccctgcgttcacacgtgcgtgacgatgaagtcgtctgggtcgaaaccgacaataccggcgcggatatttatggcgatcatcaggtgcgcgcctgcctgcgcggccgatccatccgccgccgcattaatcatcccgaccgccttaactatcccatgaagcgcgtcggcaaacgcggcgaaggcaagtttgtccgcattagctgggaggaggcgctggatacgatcgccgacaatctcaaacgcatcgtcaaagagtatggcaacgaagcggtttatattaactactcctccgggattgtcggcggcaatatcacccgctcctccccttacgcctcgctggtcgcgcgtctgatgaactgctacggcggttttttaagccactacggtacctacagtaccgcgcagatttcctgcgcgatgccgtatacctacggcagcaacgacggcaacagcacctccgatatcgaaaacagcaagctggtggtgatgttcggcaataacccggcggaaacccgcatgagcggcggcgggatcacttactatttagaacaggcgcgagagcgctctaacgcgcgaatgatcgttatcgacccgcgctacacggacaccgccgccgggcgggaggatgagtggatcccgattcgccccggcactgacgccgcgctggtggcgggcatcgcctgggtgctgattaatgaaaatctggtcgatcaggcgttcctcgatacgtactgcgtcggctacgatgaaaaaacgctgccggcagatgccccgaagaacgggcattacaaagcgtatattcttggacagggcgatgacggcgtggcgaaaacgccgcaatgggcctcgcggatcaccggcattcccgtcgaccgcatcatcaagctggccagggaaatcggcagcaccaggccggcttacatttgccagggatggggtccgcagcgccaggctaacggcgaactgacctcccgggcgatcgccatgctgcctattttgaccggcaacgtcggcatcaacggcggcaacagcggcgcgcgcgagtcaacttacactatcaccatcgaacgcatgccgctgccggaaaacccggtgaaaacccagatctcctgctttagctggaccgacgccatcgatcgcggcgcggaaatgaccgccacccgcgacggcgtgcgtggcaaagagaagctggacgtaccgattaaattcatctggaactacgccggcaataccatcattaaccagcactccgatatcaataagacccacgagatcctgcgggacgaaagcaagtgcgagacgatcgtggttatcgaaaactttatgacctcctcggccaaatacgccgatatcctgctgccggatctgatgaccgtcgagcaggaagacattattcccaacgactacgccggcaatatgggctatctcatctttattcagccggtcacctccgctaaattcgagcgcaaacctatctactggatcctcagcgaagtggcaaaacggcttggcgaggatgtccaccagaagtttaccgaaggccgtacccaggagcagtggctgcagcatttgtacgcgaaaatgctggcgaaagacccggcgctcccgagctacgatgaactgaaaaagatggggatttacaagcgtaaagaccccaacggtcactttgtggcctaccgcgacttccgcaaagacccggtcgccaacccgctaaaaaccccgtcgggtaaaatcgagatctactccagccgtctggcggatatcgccgccaaatggcagctggaaaaagacgaaaccatcagtccattaccggtatatgcttctactttcgaaggctgggacgatcctctgcgcgagaaattcccgctgcaaatgttcggcttccactataaagcgcgtacccactccagctacggcaatgtggatgtcctgcaggcggcctgtcgtcaggaggtgtggctaaatccgctggacgccgaaaagcgcgggattaagaacggcgatatggtgcgcgtattcaacgcccgcggcgagctgcgcattccggctaaggtgaccccgcgcatcatgcccggcgtgtcggcaatgggccagggcgcctggcatgacgccaacatgaatggcgatcgtatcgatcgcggatcctgtattaatacgctgacgacgcaccgcccttcgccgctggctaaaggcaatccgcagcacaccaatctggtcgaaatcgagaaggtttaaggagtaaaccatgagcgctcagtatggattttttatcgattccgcccgctgcaccggctgtaaaacctgcgagctggcctgcaaggattataaaaacctcacgcctgacgtgagctttcgccgcatctacgaatacgcgggcggcgactggcaggaggacaacggcgtgtggcagcaaaacgtcttcgcctattacctgtccatcgcctgcaaccactgcgaagacccggcctgcacaaaagtgtgccccagcggcgccatgcacaagcgcgatgacggctttgtggtggtgaatgaagcggtgtgcatcggctgtcgttactgccacatggcctgcccgtacggcgcgccgcagtacaacgcggcaaagggccatatgaccaaatgcgacggctgctatgaccgggtcgccgagggtaaaaagccgatttgcgtcgagtcctgcccgctgcgggcgctcgactttggccccatcgaagaactgcgtgaaaagcacggtcagcttgccgccgtcgccccgctgccttctgcgcacttcaccaggccgagtatcgcgatcaaaccgaacgccaacgcgcgtccgtgcggcgataccaccggctatctggccaatccgaaggaggtgtaaaatgggaaatggatggcatgaatggccgctggtgctgtttacggtgctggggcaaagcgtcgcaggggcgattatcgtcagcgggctcggctggctttcgctgaataataactccgaagcccggcagcgcctggtgcgctgcatgttttttatctggctggtcatggggattggctttctggcgtcgattatccacctcggctcgccgctgcgggcatttaactctcttacccgggtcggcgcatcggcgttaagtaatgaaatcgccagcggcgcgctgtttttcgccgtcggaggagtctggtggctgctgacgtttctcggcaaaatgccggcaatcctggccaaggcctggcttctgctcaccatgctgctcggctgcctgttcgtcctcgagatgaccctggtctatcaaattaataccgtgccgacctggtataatgcctacaccaccgccgccttcttcctgacgatggtgctgtgcgggccgcttttcgccgccctgttgctgcgggtagccaacgtgccttttaacggcacggtcttcgcgtcgatgagcgtcctcgcgctgctggcaagcctggccgtggtcattttgcagaacagcgaactggcggagatccgcagttccgtgcagcaggccagcgccctgctgccaaactacggctggctacaaatcctgcgtttagcatttttgacgctgggccttggctgctggatctgcccgctggcaagaaagaaaaacccgcgcatcgccagcctgctgctcggactgatactggtattactcggcgagtttatcggtcgcggcctgttttatggcctacatatgaccgtcggtacggcgattgccggttaatgaatgggtgccgcggcaccctctgcagtaaggaatagatatgatgcaatcgcaagaccgcgatgccgtcgtactcagcgcccgtacgctgggggcgttgttctcttatgctccgggcagcgagcaggctgctccgctggttgccgccctgcgcgacggcagctggcaaagtcagtggccctggccggtcgcgaacggcctggcggcgcagttcgctctcgaagacgatgaaccgctggcggacgcctggcagcggctgttcatcggcccgtgggcgctgcctgcgccgccgtggggctccgtctggctggataaagaaagcgtgctgtttggcgactctacgctggcgctgcgcgagtggatgcgggctaacggcatcggtttgtctgagcaacgcgctgaaccggaagaccacttcggtacgctgctgctgctggcggcctggctttgtgaatccggtcaggatgaggcatttaaccagcttctggcctggcatcttctcccgtggtcgggccgttttctgagcgtgtttattgccggggcgggaaaccctttttatcaggctcttggtcagctggcgcaagaaacgctggcgcgatggcaggcgcggctgccctgcgcggtcgcggataagccgctctaccgctaatgccctgacgttatgcccgcccgccgggcataacgcacttcgtgacaacgtcacatttaatctctttcgcacttatcgcttttgcgtctatgcttattcccggtaaaaataagccccatttcccgttaaccgaattcgctgatgcatcgtcttcacgcttatcctgatgttcaggttatgtttcgccgcatggttatcgccatgctggtcggcgtcctcgccgcgctcgcggttgccctgtttcgccatgcgatgaccggtctggaaagcctgtttctgagcaatgacagcggaagcctggtgaacgccgccgagtcgttgccaccatggcgtcggttgctgacgcccgcgcttggcggccttgcggctggtgccctgctctggctctggcagcgccgcacccttgcgcggccccgtgcgccaaccgactatatggaagcgctcgagaccggcgacggcgtgtttgatacgccagccagcctggtaaaatcgctggcctctctgctggtggtgacgaccggcagcgccatcggtcgcgagggggcgatgatcctgctggcggcgctggccgcgtcgctgttcgcccgccgctttacgccaaaagaagagtggaagctatgggtagcctgcggcgccgccgccgggatggccagcgcttaccacgctccgctggccgggagcctgtttatcgccgagatcttattcggtaccctgatgctggcgtcgcttggcccggtggtgattgccgcggtggtggccctgctgctgaccaatctgctgaacggcgattcggctccgctgtatcacgttgaattccacgaaaccctgagcgcgacgcactatgcgctgatgctggcgacggcgctgctggccgggctttgcgggccgctgtttatctggctgatgagctatagccaccggtgctttgtccggctgcacctgtcgcccccgtggcagctggcgctgggcggccttatcgtcggtctgctgtcgctgctcgcgccggccgtctggggaaatggctatagcgttgtgcaaagctatcttctttcgccgccgctcttcagcgccatgattgtggtgtttgtctgcaagctgctcgccgtgctggccagcagcggttccggcgcgccgggcggcgtttttaccccaacgctgtttgttgggctggggatcggcatgctgttcgccagcctgaccgggctatggctacctgattaccaggctatcgcgatagtggttggcttaaccggcatggcggcgtttctggcagccaccacccacgcgccgattatgtccacgctgatgatttgtgaaatgaccggacaatacgttttactgcccggtttactgattgccagcgtactggcgtcggtgctgtcgcggacgttacgccgggattctatctaccgccatcacctcgccgagtatcgataagtcgatatactggctcagttcacgctgctccgcgcgcggtaagtaaggcagttcaccgatcagcggcgccggcagctttttgctcagcacctcgatgatttcagcataatgcgccaggcctgggttaatccggttggccacccagccgatcagcggcaggccgtcgttggcaatcgcctgcgcggtcagcagagcatgattgatacagccttcctgaatgccgacgaccattaacaccggcagctgttcctgcaccacccattccgaaagcggacgcaggtcgttcatcaggctgcgccagccgccggtaccttcaaccaccacatgttcaacctggccgctgaggcgctggagaccatccgacagcagtccgtagttgatcgggcaactgtgcgccacgctgctttcatcttcgcttaacgcgatgggattgacagcttcatacggtaacaccagcgatgacacgctctgtaagaccagcgcatctttgttccgcagtccgtccggcgtctctttactgcccttcgccacaggcttgtacccggcgacgcttttgccgctggcagccagtgcctgcaacagcgcacgggaaaccaccgtcttgccgacagcggtgtcagtacctgttatgaagaaacgcttaaacatcactaaccccacagttatgttgatgaaatatacgggagagaaataatcaactgtggaaaaagtctacgcgatgctgccggaagccagcttgagatagcgcaatttttggtgtgaatatgaaaaaatgttaaccctgtaacagtcgtatcagcagcgatccgttatagagggcatcctttaccagggccgcgccagccatcgttccccggttagaaaactgggtgctttccacggcaatatgtcggctataggctggtaacgattgttgtcgaatacaatcagatattgccggaaacaggatatccgcggcaagattgaagggagagccgataaggattttctgcgggttaaagaggttaaccataatcgccagaatccgtccaacgtggttcccgacgccgctgataatgtcccgcgccagtaaatccccctgcagcgcggcctgacatagccattcaacgctcagcggctgctgatgcagcattgagctcatcgacttcgccatgcggatctgcgccagttccagcacactctccacgctggcaatggtttccagacagccatggttaccgcaatagcagcgtttaccatacgggtcgacctgggtgtggccgatttcgaccagactgctgctgcccgcgtgcagcagacgaccgtcggtgatcacgcccgcgccaacgttatggtcgatcaccacctgaatcacatctcgcgctccccgggaggcgccaaacagcgattcggccatggtccaggcgctgatatcgtgctgaatataaaccgatacgccggtatgattggctaagatttcgcccagcggcatgtctttaacgtcttcataaaacggcatccggtggatgattccgtgctcggtatcgatgatccccggcatggtgacggcgatggcggttaaacgctccagcttcttttggtgacgaataaagaactggtcaacctgatcgagcagccggctcgcgaagggctgaacgtgctgtaacgccagttccagctgctcttccaccaccagcgcgctgcttaaatcccgtagcgcgaggtggatctcgccgcggctgatgcggatagagaggtagtgccaggcttcggtttccaccatcaagccaacggcaggccttccccggctccctggctcctggatctccgtctcctggaccagatgcgcttccagcatttcgcggacgattttggtgatgctggcaggggccagctgcgcgaagcgcgagaggtcgatgcgcgacaccgggccaagctgatcaatcaggcgataaaccgcgcccgcgttggtctgcttaatttgatcgatatggcctggctgactgtccgctaccaccgttgactccctttattttcgcgcttcgaaataaactgatggctatggtgaagcacttcaacggtactcgtcaaatttttgcttagccttgtgatttaccgcacatttttagccgttatttgtcctaaatgtctcatgtggcgctggcaagcagcgattcacgaaaacgccgggccgcttgcccctgttcgtgatgcttcgaccacaccagccacatttccgacaccgcgtcctgctcttcgatcggcagccagcacatttccaacagctggacccgcctgaaggacgccggtaaaatcgacacgccaagcccggcggccaccaggccgataatcgtcattgcctcccccacctcctgggtgatggctggcgtcaggtcgtagcggcgcatcaagcccagaatgtcgtcatacagcccggtacccacatggggatcgaaaaacacgaacggctcccgcgccagttcccgcaggcttacgcgcggctggctggccagcggatgatcgcggggtaccatcgccagcagcggttcgcgcagcactctttcccaggccagggtatccggcagctgggtattacgcatcagtcccagatccagcgcgccttcgttcagcggcacaatctgctcgcgcgtgttggtttcccgcgtctgaatatgcacatcgggatagcggcggcgaaaggtcgacagcgtgtcggaaaccgccttgataaagggggccgatgaggtaaagccaatgcgcagctcgccggtttcgccgtggtgaagccgagccgcgcgcgcggcagcatcatcgacctgcgagaggatctgccggctatcggcgagaaactgccttccggcttcggtcaggctgacgctgcgattagtacgagcaaacagacgcgcgccaatttgctgttcaaggatttgaatctgctggctaagcggcggctgagagatatttaaccgcgccgccgcatggccaaaatggagctcttccgccacggcaataaaatagcgcagatggcgcagttcaatattcatatttaaaacgtcttatttgagattattaatatattagacagaatatttacattttcataccctgaataagtggccattgcggtcacttaactctctgtatatcagcaaggatttttccgtgagtcgtacaactaccgttgacaccgccccggcaaacgacgtcagcgacatcatcgctcctcagccaaaccagtttatcaaacgcggtactccgcaatttattcgcgtcactctcgccctcttttctgccggactggcgacgttcgcgctgctttattgcgtccagccgatcctcccggtgctttccagtgaattcggcgtctcgccggccagcagcagtatctcgctgtcgatttccacggcgatgctggcggtcggcctgctgtttaccggtccgctgtccgacgctattggccgcaaacaggtgatggttaccgcgctggtgctggcctcctgctgctcactgctgtcgacgatgatgtccagctggcatgggatcctgatgatgcgcgccctgatcggcctgtcgctgagcggcgtggcggcggtcggcatgacctatctgagcgaagagattcaccccagcgtggtggcgttctcaatgggtctttatatcagcggaaactccattggcggcatgagcggccgtctgctgacgggggtatttaccgatttcttcggctggcggatagcgctggcggtcattagcggcttcgcgctggcggccgcgctgatgttctggcgcatcctgccggaatcgcgccacttccgtccaacctcgctgcggccaaaatcgctgctgatcaacttccgcctgcactggcgcgatcgcgggctgccgctgctgtttcttgagggtttcttgttaatggggtcattcgtgacgctgtttaactatatcggttaccgcctgatgctttcgccgtggtccctcagccaggcggtcgttggcctgctatcggtggcctatttgaccggtacctggagttcgccgaaagccggggccatgaccgttcgctacggccgcggcccggtgctgctgttctcgactgcggtgatgctcggtggcctgctgctgaccctgttctcgtcgctgtggctgatttttatcggcatgctgctgttttccgcgggttttttcgcggcccactcggtggccagcagctggattggcccgcgcgcgcgtcgtgcccgcggccaggcgtcatcgctctatttattcagctactatctgggttccagtatggcggggacgttaggcggcgtattctggcataactacggctggaacggcgtaggtgggtttatcgcgctgatgctgctggcggcgctgctcaccggcgcgtgtctacacaagcgactgaaataacgcagattaacgtggcctgaaacgggccacgctcttcaccacatccccagtaccgacgacattcccaacagttctctaacggcatcgacggaaagcagtgctataaacagccaggtaaacggattcataatccacctcgcatcggcggcccgtgcctgcattaagtttagccgtagttcagagaaagcgtctgctactttacgcacatctggattatttcgagccaaacataaaatacgcaatcgattaatcactacattatgctgatgcttgcgtcgagcgggcgagccgacgctgtgggcaatttcccattaacgtcggggtgatttatgtcgaaagcgcccgcatccctcgaccccaccggcggatcgcgatagtgtaggcccacgaaaaagcttttgttcacttgccaccgtcagagtgtaaacatgaccgaaaataaaaattatcatcagcttacccgcaccttccagcgactctcccgcttctcgcatctttccgccatcgccggctgggatatgttcgccatgatgccccccggcggcagcgcggcccgcggcgaagcgctggccgagcttggcgttttgcagcatcagatcctgaccgataaaaaagtgggtgaatggctgcagaatgcgcttcaggaagagctaaatgatgtggaacaggccaacctgcgcgaaatgacccgtcagtacgaacaggcggcgctgctgccggaaagcctggtggaagcgaaatcgctggcgggtagccgctgcgagcacgcctggcgcagccagcgtccggcgaacgactggcagggttttgccgagaacctgcgtgacgtcgtcaaactgagtcgcgaagaggcgcagattcgggctgcggcaaaaggcggttcccgctacgacgcgctgctggatatttttgaacccgatatgaccagcgcccgtcttgacgtactgttcgcggatctgaaatcctggcttccttcgctgctggagaaggtggttgagaagcaggcgcaaacgccgctcatcgaacctcaagggccgtttccgattgccgaccagcgcgaactggggctggaggcgatgcgcgtgctgggatttgattttgacggcggacgtctggatatcagcgcccacccgttctgtggcggcgtgccccaggacgtccgtatcaccacgcgctacaacgaaaacgacctgctcagcgcgctgtttggcgtcattcacgaaaccggccacgcgcgctatgaacaaaacctgccgcgcaactggctcgatcagcccattgccctcgcccgctccacggcgatccatgaatcgcaaagcctgtttttcgagatgcagcttggccgtagcgacgccttcctgcagcgcctgctgccaacggtacgccagtactttggtgaacagccggcctttagccgcgaaaacttcatcgcttggaaccagcgcgtcaaaccgggctttatccgcgtcgacgctgacgaagtgagctatccggcacacgttattctgcgctacgaaattgaacgcgcgctgattgatggcgatattgaggtcgaggatattccggcgctgtgggatgaaaaaatgcagcactggctgggactttccaccctcggcaactatcgcgacggctgtatgcaggatatccactggaccgacggcggttttggctatttcccttcctacacgcttggcgcgatgtacgccgctcagctgatggcttccgccagacgggcgctaccgcagctggaaagcgatatcgccaacggtaacttcagcgccctgtttgactggctgcggcaaaatatctggcagcacggtagccgttttaccacctcgcagctgattcagcatgcaaccggagaagaccttaacagcgactatttccgccagcaccttacctcgcgttatctgtaaatcaccggcgtcgggccgcgcccgacgccgtgtcccatcgttgtagcagcgcgttgtacatatggttacacgccgataccaaacactcacggaaacctcgataagacaggcatatagttctttcaacggccccgcagtggggttgaaacaagaaaccttttcgaggatatcagaatgaaaaaagtattagctctggtcgttgccgctgcaatgggtctgtcttctgttgctttcgctgccgatgctgccaccaccacgactccggcgccggctgctgcaactcacagcaccaccgctaaagcgacccaccataagaaacaccataccgccgctgcgaaaccagctgctgagcagaaagcgcaggctgcgaaaaagcacaaaaaagcagccgctaaacccgctgccacccagaaagcgcaggcagctaaaaagcacaaaaaagcagaagctaaaccggctgccacccagaaagctcaggccgctaagaaacacaaaaaagccgctgctaaaccggtagctcagaaagcacaggcagcgaaaaaacaccacaaaaccaccaaacatcataccgctaaaccagctgcacaaccggctgcttaatctcccgggttaagcgatgtgatatgatatcggcgctggcttcagcgccgtttttttctggagagcaccatgctgcggcgctatcgttttgagctcatcctgatcctgctgattatctgcgcgctggtcgccagccgtttttttctttactaaacctattgctgccacaggttgtcgccgagaccgtcgtcaaacgtttgacgtaacgcgccgttagccaacgacgaaccgccagaatatcaagcgaaagcacgctccggtcgatacgcacccacaccgccgtcaacagccccagacagcagccgataccgtcggcgatatgaatacactgcggaaaaaagagaatatcgttggggtcgcttaatgcggtcgccaaacctgccatcaccccgctacgctttgttgccacctgctgcgcaacggcaccttcacgcaatattgccggcagcgttagcgcccggaagagaaaaagtaagggacggagattttgctgacgagaacaccggcggcctgtccggggatttatctatcaatcaaacgccggaacgggcggcgctggccgcaaagcgcgctcagcccgccgcttaaacctgcctggttccgccacgatgaggccgcggattaaagaacgtgaaccgccgtcaccagcagatagcccgtcgcgccccaaatcattgctgataccagcgaaacgtaaaccaatgcgcgaataccttgtttagacataaatcctcccgtatatcgggtgtttgacattgcagatatcatcgccgggataacatctctgtttgctcaacaaggtgatagcaataacaacgttttcggtgagaaaatgtttcgctttgaaagtaattgataaacaggtaaagaagtccgattttcctgtgaagatatctctttttttgcgtgatattggccgttttcgccattaactgccttgagaaaaagctgaaccgaaaatcctttattcgccccccgccggttgtacgttcggatacacgatttatgttgcttccgttgcccttttctgcggaaataacgccgcaggaaaatggcgttaacatattgaattcacgccattcatccgtaagcgactggcgttttttgctgatttcgcctgccgcctggcttaattaaaattattcttaactttcataaacttaaatctgctgctactttcaatatacataattatctccccagagagtgatatgcgtagagacgtcctgttattactgtgttcaatttccctgtttccagcgctggtccaggccgacgatgatggtatgagtgcaaaagatattaagacgctgttttttggtcatgacgaccgaaaaccggtcagcaaccccacggacgatccctgggatgcgattgggcaactggaaaccgccagcggtaatctctgtaccgccacgcttatcgcccccaatctggcgctcaccgccgggcactgcctgctcacgccgcccaaaggcaaaccggataaacccgtcgcgctgcgttttatctcgcgtaaaggcggctgggtgtacgaaattcacggtattgaaggccgcgtagacccttcgctggggaaacggcttaaggcggacggcgatggctggatagttcccagcgccgcggcgccgtgggattttggccttatcgtgctgcgctacgccccttccggcattacgccggtgccgatttttagcggcagcaaagccgatctgaccgccgcgctaaaaaccgcagaacgaaaagtgactcagtctggctatccggaagatcatctggataatctctatacccaccaggattgcgtagtcaccggctgggcgcagacatcggtgctctctcatcagtgcgatacgctgccgggggatagcggctcgccgctgctgctgaaaaccgacgacggctggcaggtgattgcggtgcagagttcggcgcctggaccaaaagatcgctggcgggcggacaaccgcgccatctccgtcaccggctttcgcgataagcttgaagcgctggctgcccagtaagcggtcagccttgctgctggcgcagctgcaataacgacgcgacgggcatcggctcgctgaagaagaaaccctgcaatctgtcgcatcccgcccgccgcagcagcgccagctgttgctgattctcaacgccctccgccaccaccgtgatgcctaacgctccggcaatacggacggtcccgcgcaccagctccgccgcctgggtatccacatccaccagcccggccagggatttgtcgattttaagactgtcgaagctgaagctgcgtaaatagccgatgctggaatagccggtgccaaaatcatcgagcgccaccgcgatgccaagcgcccttaagttctcaatggccgacttcgcccgctcgggattctccagcacgtagctctccgtgacttcgagctgtaaccgacgggccgggaaatgacagcggcccagcgcctgcaccacccgcgactcaaactccggatcgcggaactgcgccggggagatattcaccgacagcagcagatcgtccagtggctgcagttcgctacaggcgcgttcaagcacaaactggccaagcgcgtagatcaaaccgctactttcggcgataccgataaacgcatccggcggcagcgccccctgaggacgccgaggccagcgcagcagcgcttccacgccttccataaccagcgtatcggcgttgacgatcggctgataccagacatcaaactcttcgttctccagtccctgacgaatgccattttcgatattcagctgatactgccgcgcgtcgctgagcgcttcgtcataccaggtcgtgcgccctttgccggtttttttcgagtggtacatggcaatatcggcgcggcgaaaaagctcggtgctggagcagcttgccgggaggccgctggcgataccgatactggcgctgatataaatttttcgctcgttgaggataacgggcgcttttaacagttccagtaccgcccaggcaaaagccagcgcctgatttaccgcctgttcgccgcttaccgtcatcgcgaactcatcgccgcccatacgcgccagcatcccttcaggcggaacgcgctcccgaagttctttagcgatatgaataatcagcgcatcgccaacgtcatggccgtagttatcattaacatccttaaagccgtcgagatcgataaataccacgctttgcatttggtattgggaggtatcgcacacctggttaaggcgttcgatcagcgcccgtcggtttggcaggcggctcagccagtcggtcatggcactgtcgcgcgccagcttttcgccgcgcgccagcttgtaaagcccgaggtagctgaagagaataaacagcaggatcagcccagccgccacggcggcaatcagccgcatactgtcggaggccgcccgcgcggcttccgcgccgggaagccccggctgccagctcaggtaacccacgatctccccggcctgggtgcgcagcggaatactgtattctccgccgcctggcgtgacgtgcaggttgcgaatctgaaacgtgtcgcccaggcgctcaagcatttgcgagttgatatggcgggtgatcaccagatagcgacgcgtatcatcatgcacctgtagccgccctgccgtcgggcgaatcaggccaataccaataaacgcaataccggcgcgggttcgcgtgatgccggcataagcgcttttaccgctgcgcagcgcggcggcatgctgcgagataagcgaacgaaaaccgttgccgaggaattgggtatcctgctcggtaaagctctcactgcgaaacgatccccacagcacccgatagtgctggtcgagtacgaaagtgccgtcatagagattattgattttaaaacccgatccccatgagttgtagagccattgcggatcgagcctatcggtataggtctgatgcaccgcatcatcccagatagcgttatccatcaccagcgacagcacgcggttcaccgaggtctgcaccgccccgtccaccgatagcacggaacgatgtttatcaatttcgtttgctttcaggccgatcaggtgttgggtgagataaaggagcgaaacaatggacacgattaagccgatcccggcgaggacaatcatgatggacagcgttctggcggagggaatattgcgccagcctggcaaatgaatcatgttctgccctcatatcggccggcagcaaaatacgccgaactggctcttttttaagcgtaatacagagagcagaatttaccgcccgcattcacaggcggcatcatatcaggcgagtttaattaacaccatgccgaccaccagcagaagcagaccggcccagcctttatgattcagccgctggccaaacagcacccagccggcggcaatggtcgccgcgataccgaaaccgccccacagcgcataggccaccgacaggtcaattcctttgaccgcctgcgaaagcgcgctaaaggcgcccaggaccgccgccagcgacataatgccgtagaatttacgtcgaaagccgtcggaaaatttcagaaaaacgttggccaaaatttccagcgcaatcgccagcgccagccaggcggcgtggacccactcaaactgttgcatgcgctttctccttgcccggcttcaccgctttctgcgtccccgatttaatcaagacaatcccggcgaccagggtcaccaggccggcgatttttatcgtcgacagcgtctcatcaaacagcaggacgctgaagatagtgatcagtaaaatgccgatcccctcccagagggcataggccacgccgagggcgatttttttcaccgcgaaagccagaaaaatataagaaagcgcgatcatgaccagcattaaaataaaaccagtatggccgccgcttacgcttgcccatttcatcgacaacgtgccggtaatttcagcaacgatagctaaagctaataaaatccaataaaacatgatcccttctcctgcttgagaatataatccatggcggcttacagagaagtaaaccggaaaaattctgacgttaaattagccgtgcgcagcgcgccagctcaggcagagagaagaagactaaagcgccgagcgccagtgctgctcgccgagaaagcgggagtgagagagggatactgcagggtgaaaagaaatatacatcctgaactgattgtccataaaattacaattatccgcggtattgcttctcgtcatttgcggatcaaaattgtcctctgtagttatacacacgcagatttgtaccataacgccacatttaactcaaagtctttgcagttctttacctctggtatttgatttggattagttttttccgatcgcaatcaccattatgatatcgttccggccattattgattaattggtcgttttttttcatttagcggacgcgacgcgctgagacgccgactttgccaacgtctacaatgactcacattagaccccattttttctctcgcagggagcggtatggccaaacccatcatcacgcttaacggcttaaaaatagtcatcatgctcggcatgctggttatcatcctgacaggcattcgcttcgcggcggatattatcgttccttttgttctggcgatctttctggcggtggtgataaacccgctggttcagctcatggtgcgctgccgggtaccgcgggtgctggctatttcgctcctggtcggcgtgattgtcctgctggccgttgtgctgctggcctcgctcggcacgtcgcttaacgagcttgcgcgcaccctgccgcagtaccgtaattatctctatgaaccgatgcagaccgttgcgccctggctacagcgcttcggctttaccgtgtcggtggtggagctgaataagtatattgaccccaacgcggtgatgacgctggtgaccggcctgctcacccagctttccaacgcgatgtcctctatcttcctgctgctgctgacggtggtctttatgctgctggaagtgccgcagcttcccgcgaagctgcagcagctgatgtcgcggccggtggagggaatgggcgcgattcagcgcgcgctggatagcgtctcccactacctggtgttaaaaaccgccatcagcctggtgaccggcctggtggtctggggaatgctggtgctgctggacgtccgctttgcttttatgtggggactgctggcctttgcgctcaactacattcccaacattggttcggtgctcgcggcgatcccgccgatcctgcaggtgctggtgtttggcggtctgtacgaagcgctggtggtcctggcaggctatctggtgattaacctggtgttcggcaatattcttgaaccgcgcattatgggccgcgggctggggctgtcgacgctggtggtcttcctgtcattgatcttctggggctggctgctgggcccggtgggtatgctactctcggtaccgttgacgattatcgtcaaaatcgccctcgaacagacggtggccgggcaaagtattgcctttctgctgagtgatttgagtaaaaactaacgccattgcgcatgcttccccggaggcgatgctggcgcatctgtccgggctaccggcccgcagacgacccttaacctgtagcccgggcaggcgctttgcgccgcccccgggagcagagcgcggagccgatgaacttccccggaggcgatgcggcgcatctgtccaggctaccggcccgcagacgcccttaactgtagcccgggcaggcgctttgcgccgcccccgggagcagagcgcggagctgatgaacttccccggaggcgatgcggcgcatctgtccaggctaccggcccgcagacgcccttaacctgtagcccggctaaacgcagtgcgagccgggaagccgcgccaatacctcaacccggtacgtcccctgctcgtagaccaatcattcgcaatcattattgatcgtcatcacatctctgccccgtcaatcattactcttacgctaacgattcgccatcggccttaattgatgcccgccacctcgcgacgcacacttacttccacaccaggacaatcaaaacgattcgtcgaatcaggaggttaataatgagtgccgaacaaacgacgggacgcgtctggaaccatcgccgtacggaaaaacagcggcgactgaccgaggcgaaggtctcgggcaaagtgatccccaccgaccagctggtcgccgttcttgagcagctgctggcccccggcgaccgggtggtgctggaaggtaacaaccagaaacaggctgatttcctctcgcggatgctggcggaagttaacccacaaaaaattcacgacctgcatatgattatgccgagcgtcgggcgcagcgagcacctggacctcttcgaaaaaggtatcgcccacaagcttgatttctccttctccggtacccaaagcctgcgtatttcgcagctgctggaagatggcctgctggaaatcggcgctatccacacctacatcgaactttactctcgcctgtacgtcgacctgtcgccaaacgtcgcgctgatcgccggttacaaagccgaccgcaagggcaacctgtacaccgggccgagcaccgaagataccccggcgctggtggaagccgccgcgttccatgacggcatcgttattgcgcaggttaacgaactggtcgatgacgagtgcgatctgccgcgcgtggatatacccggttcgtggattgacttcgtggtcgtcgcggataaaccgttctttatcgagccgctgtttacccgcgatccgcgcctgattaagcaggaacatatcctgatggcgatgatggcgattaaaggcatctacgccgagcatcaggtgcaatccctgaaccacgggatcggctttaacaccgccgccatcgaactgctgctgccgacctacggcgaacagctcggcctgaagggcaaaatctgtaaacactggacgctgaacccgcaccccacccttattccggcaattgaaagcggttgggtcgagagcgtgcactgcttcggcggcgagctgggaatggaagagtacattcgcgcgcgtccggatatcttcttcaccggcgccgacggctccatgcgctccaaccgcgcgttctgccagctggcgggacagtatgcggtagatatgtttatcggctcgaccttacaggttgacggctacgccaactcctcgacggtgacccgcggccgcctctccggcttcggcggcgcgccgaatatgggccacgacccgcacggtcgccgccacgctacgccggcatggctcaacatgatcaccgaaccggatccgatgcagcgcggtaaaaagctggtcgttcagatggtggaaaccttccaggcgggcgtgaaaccgaccttcgtggaaaaactcgacgccgttgaggtcgccaaaacctccggaatgccgctggcgccggtgatgatttacggcgatgacgtcacccacgtgctgaccgaagaaggcatcgcctatctctatcgggcggaaagcctggaagagcgccgggcaatggtggcggccgtggccgggatcaccgatatcgggctcggcgttgacgccaaacgcgtggccgcactgcgccaaagcggcaaagtcgtctatccggaagatatcggtatccgccgcagtgacgccacccgctctctgctcgccgccggcagcgtagccgatctggtggagtggtccgacggtctgtacaacccaccggcaaaattccggagctggtaatgaaaaaactctccccccacgttgctgaaacccgggcccgctggctggcccagaccgccagcgcctgcctggttgacgaagcgcgactcagccccaagccgggcctggtggatagccgcggcaacggcgcgcatcaggacctgaacctggccctgatggagcgttcggcccacagcctgcagccgacgtttcacgcgctggctcagcagagctggcggcgtccggccgacgttgccctgcgggaaaccgttggccggcttggccgcgaaggcgaagcgcggatgatgcaggcgaccgccggggtcaatacccatcgcggcgctatctgggcgctgggcctgctggtcagcgcgacggcgatgctcgggggggagggtcaggcacagagaattacggaaaccgccgccgccctcgcccgtctgccggacgcctgcgcgccaaagaccttcagtaaaggtctgcgcgccagccgccgctggcaggttcccggcgcgcgggaagaagcgcagcgcgcttttccgcacatcaccaccctggcgctgccgcagctattgcgcagccgggccgcgggggccagcgaggatcaggcccggcttgacgcgctgatggcgattatgacctcgcttagcgatacctgcgtgctctcccgcgccggaatggcgggccttgaggcgatgcggcaaggcgcagccgaggtgctggcggcaggaggatgtgcgacagccagggggcgcgccgcgctggcgcgtctcgacgtgcagatgctggcgcagaacgcctcgccgggtggcgcggcggatcttcttgccgccaccctgtttctcgaccgggtttccgcttaacgcattcagaggatgttatggaacagattaaattgtcattccctgccaaccgcgccctcagcggcaaagcgctggcaggcgttgtcggctccggcgatatggaagtgctctataccgccggacagagcgatacgctcaacgtcgaaatcaccacctccgtggacaacagccaggcgcgctggaacgcgctgttcgaacgactgagcctgattaacggcctgcccggcggacagctgatcatccacgatttcggcgccacgcccggcgtcgcgcggatccgtattgaacaggtttttgaggaggtggctcatgcgtaacgatcgcagctttattgaactccgcgcccgtgaacgcgcccgcaccctgctggatgacggcagctatcgcgaactgctggatccctttgacggcattatgtccccgtggctcggcgcgcagggcatcgtcccgcagtccgacgacggtatggtcgtcgcaaaaggcaccattaacggccagccggcggtagtcattgccatcgaaggtaccttccagggcggcagcatgggcgaagtctccggcgcgaaaatggccgccgcccttgagctggcggcggaagataaccgcaacggcattcctacccaggcggttctgtgcctggaaaccggcggcgtgcgcctgcaggaagccaatctgggccttgccgccatcgccgatattcacgccgcgattgtcgacctgcgccgctacaccccggtaatcggcatcgttgccggtaccgtcggctgcttcggcgggatgtccatcgccgcggcgctgtgcagctacctgattgtcacccgtgaagcgcgtctgggcctcaacggaccgcaggttattgaacaggaagcggggattgaagagtacgactcccgcgaccgtccgtttatctggagcatgaccggcggcgaaattcgctacgccagcggtctggtggatgccctggtgggcgatggcatcaacgcggtgaaaagcgcgatgaacgaagccattgccaaaggcgtgcccgcgcagcatcgcagcgacaaatatgaagatttcctgacccgtttgacccatttcgatacccgccagcaggcggataccgcgcagatcaaacagctattcgcccgggaggagaaataatgagccagttcacaaatcgcgccgcgctgtggctaaaccagctggcgccgaacgccccgctaatgaccggtctgtgcccatcggtgcaggttgccgacgccgattttaacggtgaaagcgcccgttttatcgccgtggtgccggatgctaataaccattatccacgcgccgctcagggtgaagtcggcctgctcgaaggctggacgctggccaaagtggtcaacgaaaccatcgacgccgatgccgataacgcggtgaagcgcccgattatcgcggttatcgatgtccccagccaggcctatggccgtcgcgaagaagcgttcggtattcatcaggcgctggcgggcgccgcgggcgcctacgcgaaggcgcggcttgccggacatccggtgattggtctgatcgtcggcaaagcgatgtccggggcgtttctcgcccacggctaccaggccaatcgactgatcgcgtttaacgacgccggcgtgctggtgcacgcgatgggcaaagcgtccgccgcgcgtatcacgctacgtaccgttgaggcgctggagaaactggcggcaaccattccgccgatggcctatgacgtcagcaactacgcaacgctcggcctgctctccgccctgctggatatcagcaatcctgacgcgccggacgcccgcgatctgacgctggtcaccgacaccctgcgcgacgccatcgctgacgcccgccgggatgtctcgctgaagtgccgccttggcgcggagaatcgccgtagttcccaacaggtgcgcgatcgcatgcgcgccagctggtagtcagtccctaagtagaagaaaacctgccggaagcggccgcccggggcgccatcgcgcgccccggaaataaaccgcttttagaaattataacaatcgcgccagtactctattttcatttacaggtgatttatgacttatgtgattattcatgccctcgcgccgatttttgtcatcatgctgctgggcttctgggccggcaaggccaaaatggtcgataacaaaaacgtctctttactcaacatcttcgtgatggacttcgccctgcccgccacgctgttcagcgccacggtgcaaacgccgtggagcggtattgtcgcgcaatcgccgctggtgctggtgctgaccggggcgatgtggattacctatgcggccatctacttcctcgcgacccgcgtcttcaagcgctcgccgcaggatgccgccgtgctgaccctgaccgtcgcgctgcctaactacgccgcgcttggcctgccgattctgggcagcgtgctcggcgaaggcgcctccacctccctctccgtcgccgtttccatcgcctgcggatcggtactgatgacgccgttctgcctgctgattctggaacgtgaaaaagcgctcgccgccggagagaacagcggctcgacgctggcaatgctgccggttctgatgtggcgttcggtgaaaaaaccaattgtctggggtccgctgctgggggtcgtgctttcggccatcggtatcaaaatgccggatctgctgctggcctctatcaaaccgctgggcctggcggcgaccgccgccgcgctgttcctgaccggggtgattctgtcggcgcgtaagctgcagctcaatgcgctgattgccacttccactattgtcaaactgctggtgcagccgtttatcgcctggggtctggtgatgctgctggggctgcacggctctatcgccattaccgccattctgatgattgcgctggcggccggtttctttggcgtggtcttcggcaaccgctttggcgtgcagtcgccggatgcggaagcggtgctgctgttaagctcggttctgtgtattctgtcgctgccgctgtttatcaccttaacgtcaggaatctaacgatgtcatcaacgccgcgtcctcatgatttagtctggttgaataatgccgccgcgctggaggcgattgaggagtcctgggtcgcacagtactggcgtattagcctgccggtggtggtacgacgcgacgttgatgctaacgcccgcattccggtgggcgtacggggtatgaagcgcgagcagcgggccgcaggctgggtacagagggaaaatatcgtccgtaccgtcagcccggaaaccctcgccgatcgccaacagctcctgcgctcgccgtttgtctcccagccgccggtacaggcggcgatatcactgaccttacacccctggccgtggcgctggggcattaccggcagcaccggctacgcgctggccaccgagattccggtgcttcacgccgccagcgatctcgatctgctgatccgcgcgccgcagccgatcgctcgcgaaacgctgctcgcctggcagtcccgcgtcgcgcagctgccctgccgggcggatacccaggtcgaaacgcccgcaggggctttcgcgctaaatgagtggctgcgcgatggccgcgccctgctgaaaacgtcccgcggcgcgcgcctgaccgctgcgccgtggaacagggaggaagcatgaaaattatctttacctttcccggtcagggaaaccagcggccggatatgctcgccgcgcttcccgaccgccagaatatcctcgctgaagcgcgaaccgtgcttggcgatgaagtagaccatttagataccgccgccgcgttaaaacatacccgtgcggtgcagctgtgcctgctgatcgcaggcacagcctgggcgcgggagctgcagcgtcagggagtaaatccggacatggtcagcggcctgtcgataggggctttcccggcggcggtgatggccggcgcgctggatttcaccgacgccctgcggctggtggcgctgcgcggcgatttaatggagcaggcttatcctcacggctacgggctgacggcgattatgggcctgacgctcgaccgcgtggaaaagctgattgccgacagcaacctctatattgccaacctgaacgcggaaacgcagattgtcattgccggacgcgacgacgagatggcccgcgtagcccggctggcgctggcggctggcgccggtaaagcacagcggctggaggtcagcgtaccttcccactgcgcgctgctggatgaaccggcggctaagctggcaaaggcattcactgacgtcacgctgcagcgcccgcgctgcgcctatctgagcggctccacggcgcgcgttttatgggacccgttaagcattgccgacgatttagcgcggaatatggcgcgaaccgtgcgctggcaggaagcgatgatcgccgctgatgaacgggacgcgcggctggcgatcgagatgccgcccggcggcgtactgacctgtctcacccgccaggcgggctggcagggggagtgtattgcgctggagcgcagcggtatcgacgttgcccgtcacctggcgaaccggcttaacggctgaggctgcgggcgtacatccgcccttctgccgccagcgccagcaggtcggcgtcgcgctcacgatggtgtgagtagacaatggagatcagctggcgcatctgatacggctccgccagcttcagcagctgtacgtcgttttcatacacctttttcattcgtcccggcagcagcgcaaagcctacgcccgcctgcaccaggctaatcatcgaaaagatatcgttaacccgggtgacgatttcaggctcgaatccggccacctggaaggcgtcctgaaatccggcataggtggcaaacccttccgccagcgaaacaaacttgcgcctggcgtaatcgcgcagctcggcgggagcggtggtatccagctgttccgtcgccggggcggcgaggaagatatcgtcctcaaacagcgggaccacatcaaaagccgaattattaaattcaccttcgttggtggcgatcaggatcgcatcaagcgcgtcatcttccagcatatccagcagcatctgattggagcccatggtgagatccagctccagctccggccgacgcagcttcatgcccataataatgcgcggcacggtttcaagggtcagggagtaaagcgtgccgatgcgcagccggccctgcccgacgccggctactttacgcgtcgcttccaggccgcgggtcatcaggctcatgacgtcctggcagtactccagcagcgtccacgccgccgggagcggcagcaggttgcgccctttatgaataaacagcgggcagccgacgccctcttccagcgtatgcagcgcccggtggacgctgacgccgctcagctgcatggcctcagcggttctggcgatgttccctttcgccataaacatcataaataccgacagcttgcggaaagtgatgtcctgattaatgtcgtctttcattgccctgggctccgcgtttcggtcttcattagcattttgtttcgtgatttcaagacagtataaccacaattaatgaatgaaggattagccggaagggggatatcagcgcgagggagagattagagcaatgtcacgttttcgccggggcagcgaagagaggccagtaggcccggtgaggcgtcagccgccaccgggcaatgtcaacgacgtgggcttacagcgccatatcgtgctgcggcgacgtttccgccttcggctccgccggtttggcggtcatcaccggcgcggaggcgttcatctcaatcaccggcggtttggtcaactgcagcgccgccgcggtatcatcccaaacctgctgggtcagcgcgacgttaccgttcagcttctggccgtagctcgggacgatatcgtgaatacggcgctgccattccgctgaatgaaactgctcagggaacatctgcttaagaacgttcagggtaatcggcgcggcggtagaagcccccggcgaagcgcccagcagcgcggagagggttttctgctggtcaaccaccacttcggtacccagcttcagtatgccgcccttctctgcatcttttttgatgatctgcacgcgctgaccggcctggatcagcttccagtcctctttacgcgcgccagggtaatactctttcagcgccgcaaaacggtcgtcgtcgctcagcatcacctggctgatgaggtatttcaccagatcgaagttgtccagacctacgtgggtcatcggcaggacgttatcggtggtggtggtgctcagcaggtcgaagaacgaaccgtttttcaggaatttcgtcgagaaggtggcgaatggcccaaacagcaccacgcgcttgccgtcgaggaaacgggcatcaagatgcgggaccgacatcggcggtgcgcctacagaggcctgaccgtaaactttttgctggtgcgcattggtcaccgccgggttttcggtcatcaggaaagagccgcctaccgggaaacccgcatagttatccgcttccggaataccggttttttgcagtaatttcagcgcgccgccgccggcgccgataaatacgtatttcgcatcgatcgcctgctcttcaccgctattaacgtttttaatcgtcacgtgccaggaattatcggcattgcgtttaaaatcggtgacttcagaagaggtctgcagcgtgaagttattatttttcttcaggctaccgatcagctggcgggttatttccccatagttaacgtcggtacccaccggagtccaggttgccgcaacgcgctgctgcggatcgcgcccttccatcaccagcggcgcccactgttttatttgcgcgtgatcggtagagaatttcatcccctggaataaggtcgtttgctgcagcgcggcgtagcgtttttgcagataatcaacgttatctccccagacgaaactcatgtgcggcgtggagttaataaaagagtgcggatcgtgcaaaatgccgcgtttgacctgcgccgtccagaactggcgggagatcataaactgttcgttaatatccagcgctttgctgacgtcgatggtgccgtccgggcgttccggcgtatagttcagctccatattcgcggagtgcccggtaccggcgttgttccagccgttagaggactccagcgcgacgccatccagcttctcaaccatcacctgtttccagtccggctgtaattcctgcagccaggtccccagcgacgcgctcataataccgccgccaatcagcaggaaatcggtttttttcgaggtatcgtcatttgcgaaggtcgccgagctgacgaacatcgctaatgcggtcatagatataatcgtatttttaattgcaggcataatagaaatatcacatagcacaagtgtaataagagcgtgcatattaacgcacttttactttattttaaaatatcatttacacatccgcacacatagctaattattgttaacctggttttttaacttaaaaaagtaaaagcctcgccagcagcaataaatacgccttgcgatggccattttcaaacggggaattaaacccgggtaagcggatgaagagtatggaataacgatgctgttgatgaccagattattttgcgttatccggcgcgtattgtggaaatacgcgccgtcgggttaagttcaggcaaccgtctgcgccgcgcgtagcgcaatccgcagatgatcgttatgctctgccagcagctcgcgcgcctgccaggcatcgagcccgctgaggagcatgagtattgccgtccggcagtgctgattgcagctggccagcgcggctttggcctcgctgcgcgagccccccgtcgccgccatcacgatcgctatctgccgctcggcctcgtgcggcgtattggcctgcagatcgacgcgcaggttttcataaacccgtccttcgcgaatcgccagcccggtggtcagcatcgtcaggatctgccgctgcgcgatgcgcgctttcggattcccgaaacccgccaccgcttctggcccggtttgcggggcgataatgatatccgccagctgcgcggcttcactggcgggctgctgcgtcacaaccgcaatcggcgcccccagcgaccaggcgtggcgcatcgcgccccagacccacggcgttttgccgctaaccgtcagcgccagcagcatatcctggttgctgaatcgcagagcctcaagttcgaaagccccaagatcgtaatgactcgcggcggtttccatctcctgccgcgcggcggtcgctcctccggcgataagggcgaccagcgaatgttttccctccggggtaaattcattcaccgcctgtgcggcggcttgacccgatgccccggcccccacaatcaccagccgccctcctcggctgagcgtcgccgtcgcgttatccatcaggcgcgcgatcgccggcaaacaggcctcaacggcatcggcaatccgcttatcatccttatgcagcagcgtcagcatatcgagggtggcaagactatcaatatgggtggtttcagggtggcgtcgttccatcattgaagcggttggcttactgctcataaaaacctccatttaaacgcgaaagaaccttccgggacgaaagcgcaggcctgaggcaaaccctttcattgaccatggctattaatggcagtgtaaggcttaagcgacgcgctttaccgccaccggagtcacagttttcatccccctgaagccattcagctgccgattggtcgttatccaaccagcggcgcgttcggcgcgccgaggttgcgaggcgaggccaatgcgctattagcgcaacgtcagcccgccatccacgacatactggctaccgctcacgaaggacgccgcgtcggaaagcagaaacagcgccacatcagccgcttcagccgccgtcccctggcggtgaagcgccaggcggctcaccaccgaggcttcaaattcgcggcgcacctcgtcgcgcataaaatggcgaaatggggtgtcaatcgggccgggaatcagcgcgttaacgcgaatatttcgttcccctaacgccgaggcccagcagcgggttaacgaaatcagcgcgcctttagtcgccgaatagaggcttgccgccgcggccccttcataagcggaagtggacgccgtcaccaccaccgaggctcccgcattaagctttccggcgagcgccgccatctggagaaccggcccgcgcacgttggtcgccatcatgcgatcaaaggccgcggcatccacctgcgacagctccccaaccgctgcgtatccggcgttgagccagaggccatcaagtccgccggatgaatcgatcgcctcggccagcgccgcgccggtcagcggatcgctggcattattgtcaatgacccgcgcccgatccgagagctgccggcgaagagacgccagccgtccgggatcgcgcccggtggcgatcacccaaccgccttcgctatcgatgcgctttgccccggcaagcccgattccgcttgtcgcaccggtgataagaactctttttgcgctaaatctcgccatggtcattgcccctctctgcgtaatcacatttatcaggatggtaaccagcgaagaactgtttgataataccagtattataaataagactgtttggggtaatagccataatgcgcggaagtgattttgcggaattaagagccttcgcgatggtcgttgagcaaggcagttttacccgggcggcggcgcatctcggcgtcacgacctccaccttaagcgcaaccatccggcgtctcgaggagcgcatcggcgtacgtttattacaccggacaacgcgcagcgtcgcgccgagcgaggccggcaagcgcatgatgcagcggctggctcctgcgctggcggcgctggaagacgcggttaccgatgcccggacggccagcgcgcccgcgggccgcctgcgcctcaatgtgtcgcgcatcgccgcgattcattatctggcgccgctgctgggcggatttatgcaacgctatcccaacattgagctggatattgttaccgacgatgctttagtcgatatcgtttcttccggttttgacgccggaattcgtctcggtgaaaagctccatcaggatatggttgccgtcaggctgagcggcgaccttgaaatgaaagtcgtcgcctcgccgcactatctggcgcaagcgccgcagccgcgaaagccgcaggatttgctgcagcacccctgtctgacttatcgcaggcccagcgacggcagcgtttatcgttgggagtttcagcgcgacggcgaacgctacgagattgcggtcaaagggccgatcgtcgtcgatgaaccggccatgctgacgccgttagccctcaagggcaccggtatcgcctatcagtttgcccatcaggtcgatccctggctggagacaggccagctagtccagctattgaaagagtggaccccggcttttcccgggttttacgtttactaccccagccgtaagcagatggcatcgcctctgcgggcgtttattgactatctgctgaccgtcggcggcaaatcgcgtccgccagaattgccgtctggctgattttgcttttattacgcggctttatgtaaaccgcgcattcagcgataatacgcctctatccgttttctcctggggtcggtatgaatgaattcgcgcagcagcccgcgcgtaaacgcgcaatgagcatgaagctgagcaccgccgtgaccttaatgatcggcagcgtcatcggttcagtactgattctggtctatgccctgtggtttatgcagattagcggcgccacccgcgacggcgtaaaagatacggcgctggcggtggcgcggacgctggccgataccccggaagtcaagcgcggcctgacgctgccgccggacagcggcattattcagccgctagcgctggccgtcacccggcgcaatggcctgctgtttgccgtcgtcaccaatatggacggcattcgctactcgcatcccaatagccagattatcggcaaaccttttatcggcgatgacatccggcccacgctggcgggcaaagagaacgttgccgttaaccacggcgtgctggctccggcgctgcgcgtcttcaccccggtgtttgacgatagccgccggcaaatcggcgtggtggcgattggcatttcgctgagcaaagtcgatacgcagatcgccgccagccgctgggatgtgattctgaccgtgctgttcagcgcgctcgtgtgcgccgtcggtacatggagtctggttcgcggcctgaagcgcgtcctgctgggccttgagccgcaggagatctcaacgcagttccagcagcgccaggcgatgctgcactcattaaaagagggcgtcgtggcggtggatacggacggcaaggtgacgctgattaaccccgccgcgcgcgacattctgtttaacggccccgggaacgatatcgcgcaaacgccgctgctggcggatttgcaggaagtgctgcaaaccggcgagccgatttacgatcgggagctgggctgtaacggtctgctgctgatcagcaacacggtccccgtccgcgacgaggatgacgtggtcggcgccatcagcaccttccgtgacaaaaccgaagtcagccagctgctgcagcggcttgacgggatggtgaactatgtggacgccctgcgtaccacatcccatgaatttatgaataagctgcacgtgatcctcggcctgttgaatatgaaaagctacgataagctggaagagtacgtgctgcagaccgcccacacctatcaggcggatatcggcgaaatccagcaccggattaaatcaccggtagtggcaggctttttgatcggtaaaattcagcgcgctaaggagcggggttttaccctcactctcgccgaagagagcctggtgccggactgcccgaatgaaaaacaggtcaccgtactggttacggtgctgggtaatttaatcgaaaacgcgctggatgctatgagcggccaggccgaaggcgaagtcggcctgctgctgcattaccagaacggctggttaagcggcgaagtcagcgatgatggtcccggtatcccggaagcgtttatcgatgatatttttaataaaggcttctccaccaaaggcgaaaaccgcggcgtcgggctgtttctcgccagccagcagcttcgcgaactgggcggatcgctggccgtggaatccgaacccggcgtatttactcaattttttgttcatctcccgtgggacagtaaaaggaaaagtgcgtgataaatgtattaattgttgacgatgatgccatggttgccgaactgaaccgcctgtacgtgggacgggtcagcggcttccgctgcagcggcacggcgtctacgttgagtaaagccagggagatgattaacgacaaggatctggagatagacctggtgctgctggatgtctatatgcagcaggatagcggtctggatctgctgcccgccattcgcgcgtccggacgggccatcgacgtgattatgattacttccgccgcggatgccgcgacggttcaggcctcgatgcgctacggcgtggtggactatctgatcaaacccttccagtttccacggtttgaagaggcgctcaccgcctggcgcgaaaagcgtaagctgatgaccggtcaaccctattatgaacaagcggatgtcgaccggctgctgcacggcggcgtaccggaagccgctgacgcccgcaagttgccgaaaggcctgacgccccagacgctgcgcaccctctgtcagtggattgatgcccatccggacgtggagttctccaccgacgagctggcggcagcggtaaatatatcccgggtttcgtgccgcaaatacctgatttggctggcgcaaattaatattttgtacaccagtatccactacggcgccacgggacgtccggtgtaccgctaccacctgatagcggagcagtacggcctgcttaagcagtacagccagtaagccggtaaccgtcatccagcagctgaaagcggaaacgacgctgtgaagagaggataacgtcgcgatttttagtgacgaaaatcgcttcgatatcctcgcgctggcgcagcgccgcgcagcctttctctacgccaagaccgtagatcagggtggtccagatatcgccgtccagcgagtcggcggaaataatcgttacgctctccagctcgttatccagcgggtagccgctacgcgggtcgagaatatggtgccagcgtttgccgtcctgctcgaagtagcgttcgtaaatgcccgaagtcaccaccgattgccccgccaccgcaatgctgccaatcagcgcatccgccgctgagtacggttttttcagcccgatagaccattcgcccagggtatggacattgccgccgagattaatcagcgcggcgttcacgccctgctgccgcaaatagtcgcgcacccggtcggcgatatagcctttcgcgatggccccaagatcgatctccattcccgtccgcgcaaggtagacgctgctggcggcgtcgtcgaggatcacatcctgcgcacgcgttaacgtcaggcgagcggcaatatcctgcggggcgggcacgctctggccctgaaaaccaacgcgccacagcttcaccagcgggccgatcgccaggttaaacgcgctgtcccgcaccatgctggcggatttggcgcatttaatcagcgcatacaccgggcggctcaccgtcaccggatgtcgcccggcggcatggttgatatccatcacctgggagtgcgcgcggttaacggtgaaaagatcttcatagcctttaatcagctgaaagacgcgggaggcgagcggttcatcgtgaacgtagagcttgaggagaatgggcgaacccatcagtacagcggagtagctgtagacgcggttgtcggacatatcgcactcctcagagagataagaagccgggccgtctatttgccagcccggcgggtgtcgctgacgtttaacctctggcgcgtttcgccgcctgatggcccgcgagggtcccgaagataataatatcggccaccgcgttaccgccgatgcggttaccgccgtgaatgccgccaaccacttcgcccgcggcaaaagcgcccgcaatcacctgatgaccggcattcagcaccgcggtatcggtgttaatggtcacgccgcccatcgtgtggtgtacccccggagcgatacgaatcgcatggtaagggccttcattgatcggcgcacgcagcgcggtggtacggccaaagtcatcgtcatgctgtttttcaacaaagccgttgtagcgttccagcgtattgagaaaagcatggtaatccatccccagtttctccgccagctgacgcggcgagctggcgctggtgacgaaacctttagcgatgtactcatcggcggctttgtttttcgcccggacgtgctcgtcaaagacgatataggcgaagtgctcaggcagcgcgataatcgcggcggaaaccttatcgcgggtctccatttcgttgaagaagcggttgccctgcgggttcaccagtatcgccccgccgccgcgaatcgactcggaaatcaggtacgaggtttgctgctcgacggtcgggtgaatctgaatttcacccatatccacggtgcccgcgccgatgcgttcaagcagcgcgataccgccgccggtcgcccctttatggttggtggtcacaaagcccgccagatccgggcggtatttcaccaccatcgcgctgttggcgctgaagccgccggtagccaccacgatgctcttcgtctgtaccactacggattcgttttcatcggtgagcaggcgcacgccgctcacctcatcgtcggtcatcaggatctcttccaccgatgtatccagcaggacatcgataccgcgtttggtgatgttacgcaccaggccgctgatcaggtagccgccgaccgccgacccgtcgcgcggacggtgggtgcggtcgatgctcatcccgccggtagtggtgatatcgttaagcataatgccgcgacgcgccagccactcaatggcttccggcgcattctccacgaagcggcgaagcagctgcgggtcgtttttgttcttaccgcctttcagcgtttcctggtaaaacagctctttgctatcttcaatacctttcacgcgctggaagcgggtctctgcggcgttcatcccggcagaagctttaatggtgttaccgccgatggtcggcattttttcaacgatcagaacgctcgcgccttcatcgtgtgcctgaatcgcggccgccagaccggctccgccgctgccgaccaccaccacatcgtagcttttcggcgccgcatcgcccgcgccctcttcggcggccagcgctttactggacttcagcatcgctttggaaaccgcctttttcaccgcttcactctggctggttgcgccggaaatcgcatccacgtgcggggtgttggcgctgaggatccgctcgcggatctcttcaaagctggtggtgaactcgacggtctgtaccgggcttgccgccagtgcgatatcggcaatgcggtcgttttccaggctgacgtttatcaccagctcgttagcgtcgtcctgaacggtttcgacgaacatccccggtttgaatttggcgtcgcccatgctcatatcgcggatcatcgcctccaccagcgagaagcgccacagcggttccgggatgttcagcgcttcgcgctggatgctgtcaataaacagctccagatcttcgccagcggcaatgcgcgccgtccagtcaggatacgcgatacaggcgcggcccaccgccatcaggtcgtagccgtgatccaggccctgctcggcatcggccgcgttcactaccccgcccacgcccatcaccggcacctgagccagggtttcggagcgcatggcgcaatatttttcaatcagcggcgtgggatcggtggtatcgacaatcgagggtcgcagcgtggcgccaaccgagaagtggagatagtcgacgccgcgggcggccagcttttccagcagatacatggtgtcagcaaaacggataccggggacttccatctcttccggggagaaccggtagccgataataaaggcatcatcggcgtactggcgggccattttgtgggtgatgtccagtaccgccagcgggaatttcgcgcgattatcgcggctgccgccccattcatcgtcgcgctggttagagtttggcgaataaaactgctggatcagataggtgttcgcgccgtgaatctcgacgccgtcgaaaccggcctgaatggcgcggcgtacgccttcgccaaacttcgcgatcatgccctcgacttcagcgccgctcagcgcgcggggcgttgctgcgccatcgcgcggcgcggcaatcgcgctcggggccaccggctggcgtccgccgataagctgcgggtcgaccatccggccgccgtggtagatctgcagaatcgcttttgacccttccgccttgatagcggcggcaattttcgccaggccagccactttttcatcattatcgataccgatggcgccggggaacgccagaccgtagtcatcaataaagcagcattcaacgataatggtgccgatactgcctgcgcgagcgcggtagtactcaaccagttcgctggtcacggtaccgtcaaaataaccggtgcaggtggtcatcggcgccattaacaggcggtttttaagctcagtaccgttcggtaaagtaaaaggacgcaaaattcgtggatgactggtcataatgacgctccagattttaaatattgaaaattgagaattgggtgacggaattgtttttgtttgtatttggtaatcccttaagtcatgccaataatatagcgctttttttagttaccaaaataattacgttagttaaaaactatttaataccaacaataacatcgatacctcctttgtattattaattaaatataattcgttcacataatggatataaccaataacaaatctgaaaccatttttaacatgcatcgccaggaagacaccaaaataaaatgataaaattcaacaatataaataaatcatcagttcatggaatcattcgtgatttaacattaagccaaatttcagacaaataaacacctcactaaacagggttatccgtaataataaaaaagtggctaacaacccgctttttttgatctaaatcaattgcaacggcgcatgaaagcgcaatatataaataacccaatattttaatttaacgcccaacgaagagctttaaataacggtcagcgcaataaccaaaatcgacaattaataattaaagaaacttttgcaactaaagaaatcgaacggttaagcgatgaccaaaccctatttttaactacttgcagatactcattatgaaagagaaaaagacaaccataccgcctgccggtgcagcaacaaatgctgcttataaacgtctgctgatgatggcgatgcccattatcgttgccgtcttactcttattcgtcccggtgcccgacggccttcccccttacgcctggcactactttgccatttttgtcggcgtgatcgtcggtctgatcttcgaaccgctgcccggcgcggtcatcggtattaccggcgtggtggtgattgcgctgtgcagccagtggctgctgttcagccctgaacagctggccgcgccagggttcaagcttgccggcgcctcctttaaatgggcggtgagcggtttcggtaactccaccgtctggcttatcttcggcgcctttatgtttgccgccggctacgataagacccagtttggccgccgtctggcgctgatcctggtgaagtatctcggccgccgcagcctgacgctgggctacgccattaccttcgccgacctgctgctggcgccgtttaccccctccaacaccgcgcgcagcggggggactatctacccgattatcgctaacctgccgccactgtacggctctaagcccaacgacccgagcgcgcgccgtatcggctcctacctgatgtgggtggccattaccgccgcctgtatcaccagctcgatgtttctctccgcactggcgccgaacctgctggcgctggcgctggtgaaaagcatcgtcggcattaatatctcctggggcacctggtttatcgccttcctgccgctgggtatcctgctgattctggcaatgccgctgctggcctactggttctacccgccggaagtgaaagtcaacgatgaagtgccgctgtgggccgcccgcgagctggaaaaacttggccgcctatcgcgcaatgaaattctgctgctggtcttcgtctgctttgcgctgatgatgtggatcttcgccgccgaatggattgaaccggcgctggccgccctgctggttatcgtgctgatgctgtggaccggcgtactttcgtggaatgacatcaccagcaacaaagcggcgtggaatacctttgcctggttcgctaccctggtggcgctggccgacggcctctcctccaccggttttatcgcctggctgggtaaagaaggcggcgcgctgatgagcggcatctccccgggcgtcgcaaccgtcgtcctgctgctggcgttctatctgctgcactatctgttcgccagcaccaccgcgcacaccaccgcgctgctgccggccatgctgactatcgcctccaccattccggggatgaatatgcaggtgttcgtactgctgatggtgacctcgctcggcgtgatggggattatcaccccctacggtaccggccccagcccaatctactacggcagcggctatctgccgaccaaagactactggcgtctcggcaccattttcggcgccatcttcctggccgccctgctgctgattggctatccgtggatgtccatgatgttctgattcataaccgtcgggccgaaccccggcggttttactcttagggagcaaagcaatgtcgactaaaccatttgtctatcaggaagcctttccgctagcaaaagataagactgaatactatctgctgagcaaagagcacgtgtccgtggccgaatttgaaggccaggagatcctcaaagtagaccctcaggccctcacccttctggcacagcaggcctttcacgatgcggcgtttatgctgcgcgtttcccaccaaaaacaggtcgcgcagatccttctcgaccctgaagccagcgataacgataagtacgtggcgctgcagttcctgcgcaactctgaaatcgcggctaaaggcgtgctgcccacctgccaggataccggcacggcgattattatgggtaagaaaggccagcgcgtgtggaccggcggcggtgatgaagcggccctcgcccgcggcgtctataacacctataccgaggataacctgcgctattcgcagaacgccgcgctggatatgtacaaagaggtcaataccgggactaacctgcctgcgcaaatcgacctccacagcgtcgacggcgacgaatataaatttctctgtatggccaaagggggcggttcggccaacaaaacctatctgtatcaggaaaccaaagcgttaatcactccggcgaagttgaaaaactatctcgttgagaagatgcgcacgctcggtaccgccgcctgcccgccgtaccatatcgcctttgtgattggcggtacctcggcagaagcgacgctaaaaacggtgaagctggcctctacccactattacgacgaactgccgaccgaaggcaacgaacacggccaggccttccgcgatattcagctggagcgggaactgctggtggaggcgcaaaacctcggtctcggcgcacagttcggcggcaaatacttcgcccacgatatccgcgtcatccgcctgccgcgacacggcgcctcctgcccggtgggcatgggcgtctcctgctcggcggatcgcaatatcaaagccaaaatcaaccgccaggggatctggattgagaaactggagagcaacccgggtcagtatattcccgaacatctgcgccagcagggcgaaggcaaggtcgtcagcatcgatcttaatcagccgatgagcgagattctggcccagctttccgcccatccggtctcgacgcgtctgacgctcaacggcaccattattgtggcccgcgatatcgcccacgcgaagctgaaagagcttatcgataacggtgaagaactgccgcagtacgtcaaagatcatccgatctactacgccggcccggcgaaaaccccggaaggctatgcgtccggctcccttggcccgaccaccgcaggccgcatggactcttacgtcgacctactgcaatcccacggcgcaagcatggtgatgctggccaaaggcaaccgcagccagcaggtcaccgatgcctgtcacaagcacggcggtttttacctcggcagcatcggcggcccggcggcggtgctggcgcagcagagcatcaagagcctggagtgcgtggcctatcctgaactggggatggaagccatctggaaaatcgaagtggaaaacttcccggcgtttattctggtggatgacaaaggcaatgacttcttccagcagatccagaataagcagtgcgcaggctgttcgcagcaaagaggatgatattacccgcccctggcggcgggtaaccgtcgaaggccgtcgcatgacggcctgagatgtgcgacaaacctgccgggtggcggctaaacggcatccagctcgtcaaatacctgctgcgccagatgcatcgtggcgttggcggcgggcaggccgcagtagagcgcggagtgcataatcagctctttcagctcatcgcgggtgacgccgttattaaacgccgcgcgcagatgcattttcagctcagcttcgcggttcagggcaatcagcatggcgatggtgatcatactgcgggtatgatgatcgagccccggtcgggtccaggtctctccccaggcgtagcgggtaataaaatcctggaactcttcattcagcggcgtcagcttttccagcgtcttatcgacgtgagcatcgccgagcaccttccgccggacctccattccccgctgatatcgctgtttatcgtccatgcttttccccctgaacaaaacccagcagcgccgagctgaacgcccccggcgcttcgatattcgataaatgcgaagccgccagcacgacgacttctgagaccgggatctgctgatgcaggaagttggcgtccgccaccgttgtgacagggtcactttctccggcgacgatcagcaccggaatcgcgatctgcgcgacctctccacgcagatcggcggcggccagcgcttcgcagcaggccgcatagccttcagcatcgatatgggtcagctggtgacacagtgcttccaccacttccggcgtcttctggcgaaatgcgtgggtaaaccagcggtccgcggcgcctgcggcgaccacttccatcccttcctgacgcaccgtgcgggcgcgcgacagccagccggcctggtcgccaatacgcgcagcggtgttggcaacgaccagcccctgaaaacgttcaggggcaaagcgccccagccacagaccggtcaggccacccattgaaatcccgcagaaccaggctttagcgatattaagatgatcgagcagcgcaatcacatcttcgccgagctgcgccagcgtcactttaccgtttttacgggtggcgccatggccgtgggtatcgtagcgcagcacgcgaaaatgctgcgttaacgcctcaagctgcggctgccacatcgcccgggtagtgcccagcgagttagagagaacgatgaccggcgcgtcttgcggcccgtctatctgataatcaacattcataacgttgctccttatagcgcgccacaacctggcgcacgaagagtgctgagctgccggtcgccgttgtcgggtccagcagttgggttaagcggctggcggagagatgctcgctgaccagcggatcggtttccagcacgcttaacagcgaacgtgacgcatccagcgcctggcgacacagcgcctcaacccggtgatgagcctcggctttgccgacaaactccgccagcgccagagtgacggcctcggccataatcaggccatgggtgatatcgaggtcggcgcgcatcttatgcgggaagacctgcatgtcgcggaccagcgcttcgctctgcgccagcgcgccgccgacgagggttatcagctccggcagcgtttcccactccgcctgccagccgcccagcgcccgctcgtgctgctggatctgcccggcatagagcgttgccaccagcccgggcgtacgctgggcggcggtcaaaatagcggcgcaggagatgggattgcgtttgtgcggcatggtagacgatccgccgcgtccttcggcgaccggttcacccacctctgcaacctcggtttgcatcagcagagaaaaatcattggcgaatttacccagcgtgccgcagacgcccgcgtaccatgcccccacctccagcagccggtcacgctggctgtgccacggcgcgtccggaagctgcaggtcgagagttttcgccagcgcgccagcgatccgcggcgcctgcgttttaagggaatcgagggtgcccgccgcgccgccaaactgcagcgccagcacccttgagcgcatctctcgcagacgcacctgccagcgcagcagcgcatccagcgtcccggccagtttcagaccaaaggtgaccggcagcgcatgctgcatccaggtacgcccgggcatcaccgtatcctgatagcgcgccgcctgatgggctaacgcgtcgagcagttgctgcagcagggagtccgtttccgccagcgcgccgcgcagttgcaggataaagccggtgtcgatagcatcctggctggtcgccccccagtgtacgtagcgcgccgccgcgtcatcccgttgtttaacccgcgcggtcagctgtttgaccagcgggatcgccagattcccggcgctggcggcggcctgccccagcgcggcaaagtcgatgttttcgtgccggcaactctcaataatgggattaagcgccgcctgcggcacgaggccgcattcgacctgagcgcgagccagcgcggcttcaaaatccagcatcccctgtacccgctgcgcatcgctgaaccaggcggtcagcggactggtgcgcatcatcggggtcaacaaactcattatggctccttaaacgcgttctataatcagcgcgatcccctgaccgacgccgatacacatggtgcacagcgcatagcgcccgccggtacggcgcagctggtacgccgcggtcattgccagacggccgccggaggcgccaagcggatgtccgagggctatcgcgccgccgttagggttgacgtgcgccgcatcgtcgggcagacccagatcgcgcgtgaccgccagcgcctgagcggcaaaggcctcattcagttcaatgacgtccatctgcccaagcgttagcccggtttgcgccagcaccttacgtaccgccggcgccgggccaaatcccataatacgcggcgccacccctgccgtcgcgacgcccaccacgcgggcgagcggctgtaaatcattggcggccagcgcctgctcgctggcaagcagcagcgcgcaggcgccgtcgttgactccggaagcgttacctgccgtcaccgtaccgtcggcgcgcaccacgccgcgcagcctggccagcgcctccgccgtggtgctgcgcgggtgctcatcgcggctaaagagtagcggttcgcccttacgctgcggcaccgagacggcgatcagttcgttggcaaagcgtccggcctcctgcgccgccgccgtacgcagctggctacgcagcgcaaacgcatcctgatcctcccgcgaaatggcgaaatcgtccgccacgttttccgccgtttccggcatcgaatccacgccgtacagcgctttcatctgcgggttaatgaagcgccagccgatggtggtatcttccatccgcatcgtgcggctaaaggcgctttcggccttgcccatcacaaacggcgcgcgcgacatgctctccacgccgccggcgatcatcagctgagtttcgccgcttttaatcgcgcgcgctgcgataccgattgcatcaaggctggaaccgcacaggcggtttacggtactacccggtacgctttccggcagaccggccagcagcagcgccatgcgcgcgacgttgcggttatcttcccccgcctggttagcgcagccgtaaatcacatcgtcaatacgcgccggatcgagtcccgggttgcgctccagcagcgctttcagcggcagcgccgccagatcgtcggcgcgcagggcggccagggtaccgccaaagcggccgaacggcgtccgcaccgcatcacagataaatgcctgattcatcataggttccttacgcgctttccgccagttgtgcaaaagtcagcgccaccggcgtgatgcgctgcagttcctcaaaagagaggccgttaaagatttcccgcaccaccgggccgctttcgctgatatcgatgaccgccaggtcggtgtagatacggctgacgcagccgacgccggtcagcggataggtgcagtgctctaccagcttgcactccccgtcgcgggtcaggtgatccatcatcacgaagacctgacgagcgccaatggccagatccatcgctccgccgacggcaggaatggcgtcgggcgcgccggtactccagttcgccagatcgccgctggcggaaacctggtaagcgccaagcacgcagatatcgaggtgcccgccgcgcatcatggcgaaggagtcgccgtggtgaaagtagcagccgccgttgagcagagtcacatactctttcccggcgttaatcagctccggatcctcttcccccggcagcggtttcggccccatccccagcaggccgttttcgctgtgcaggaagatttctttatcggcaggaagatagttggcgatgcgggtgggcaagccgatccccaggttgacgtaagcgccttcgggaatatcgcgggccacgcgctgggccatctcatcgcgagtcagtttttgcattaagagttcctcaggcgcttttagcggcaatcaggttttccagggagtagacgcgctgcacaaaaatgcccggggtaatgatgctttccgggtcgagatcgcccaagggcaccagctgcgaaacttctacaatggtggttttcgcggcggtcgccataatcgggccaaaattgcgcgccgctttgcgataaaccaggtttccccagcggtcgccctggtgggctttgatcaacgcgaagtcggccctgatggggtattcgagcacgtaatgacgcccgtcgatttcgcgggtctctttcccctccgccagcggcgtaccgtagccggtgggggtaaacaccgcgccgaggccagcgcctgccgcctggatccgcgccgcgaggttgccctgcggtaccagctccagctcaactttgccgcggcgataaaggtcatcgaaaatctgcgaatcaacctgacgtgggaatgaacagatcatctttcgcacccgaccggccttcagcagcgccgccaggccgacttcgccgttgcccgcattgttgttgataatggttaaatcacgggccccctgttctatcagagcatctatcaggtacgtcggctgcccggcggggccaaaaccgccaatcattatggtcgccccgtcgtggatcccggcgatggcatcacgtagcgtcgacacgcttttatcaatcatcaggtcgctcctgtatgtgcggtaatcgcacttttattcgttgttcgcacaaaatgtgacccgcttaacgatgctggtcaagggcgataatcgaaatatggtgcgataatcgaacatcgtgtatgtttagcgaaagaatgtgatcgacggcaaatacggagaagaaaatggagaagcatccagatgatttactgacgggcgatagcgatccgtttaagggcgatccgaactttatggcttcgctggcgcgcgggctggaggtgatccaggcgtttactccgcagcgcccgctgctctcaatttcgcagatcagccaaaagaccggcattccgcgcgcggcggtgcgccgctgcctgtatacgctgagcaaactgggctttgtttacgccgaagatggtaaaaatttccagctgcgaccgaaaattctggcgctgggccacgcctggcttgcctccacgccgctggcgcgttcggcgcagccggtgctgaagcatttaagcgaaatgctcaatgagtcctgctccatcgccactctcgacggcgacgacattctttatatcgctcgcgcgtcgagttcgcgcattatgaccatcgatctcgacatcggcagccgcctgcccgcctgggcgacctccatgggacgcgtgctgctgagctatcagccggaagagaagctgaacgatatgctgggccgggtcaccatgattcgctataccccgcaaaccgttgattcggttgcaaagctgcgtaccgaacttaagcgcgtgcaccagcagggctacgcgcttaacgatcaggagctcgagatggggctgcgctcgctggcggtgccgctgtttaaccctcaggggcagattcaggcggcgctgaacgtcggcgtacacgccgggcaggtctccacgcacgagatgctggagcgggtgttacccgagctacagaaagcagcccgggaactgacgctgctgatgcgctagcggctatgcttggcgtggcgctcccagttttcctgctttgcctccgccgattttcgcagggccacgtagcaggcgccgctgccgccgtggtgcggtaacgccgcgcagaacgcctggacttccgggagttccaccagccagcgcgccaggtagctgcgaataatattggcgtgcgcgttatcgtcgcgccctttgccatgcacgatcagcacattacgcagcccctctttttgcgcctggaccacaaaagcaaacagattctgtcggcacttctccaccggctggcgcagcagattgaggcttgcctgctggccgtatttgccgcgccggagcttatccagtacgccgctttgcagaccttcccgcttaaactcaagggcggttgccagcggcacaatatcgagatagccggtggtcagaaagttatccagctgcaggggatcaatccgctgcgcggcgcgggtattgcgcacggggtgccagtgaacatcgtgattatgtttcagaggctgaacgtcctccatggcgccaagaaatagggatttgtcgtcaaggttcatgcgcgctcctccagctactaccgggtggttactatagccgtctcgcggcgcctcctcaacgcgtttaaccacctccgcgcgattatggaaacagttgtcggctctgacgacgaaacagcgtgattaatgacgcggttaagggcgtttgccgcgtatcgcggcgctgaatcagaaaataggtggctttgggtaacgcttcgcggatggggatcatcaccagcttatccgccatcatcgggtcgttgccaagttcgaccggcagaatgctgagaaaatcgcttttcaccaccaggctaatgcacgaggagaaagtctcacaaacgatatccacctttggcgccagtccggcctggttaaacatctcctgcagctgtttgaagtagctgccgcgcggcgtcggcatcgtccagtggtgatcgagcagctcggtcagtgaagtgacgtgtgccgccgggtgaccggcgcgggcgaataccgcgaagggtttctcaaatagcttctcaaagctgaattcatgatcgtaggggccgggatagtaagtattgatggtgaaatccagctcaccctgacgcagttcattaatcatcgccagcagctgtccttccataatccgcaccttcaccagcggatgctgctgatgaaagcggcaaataaccgaaggcatcagcgaacgcgctacgctggcgccaaggccgatattaatctgcccggcctgctcgccctgacgttgcagcaattcatcctgcgccacccgcagctcttccaggatcaggctcgcatgttgataaaagctttcgccattttcggtcaacgccaccccctggctacggcggacaaacagctgcgcggagagcccctcttccagctctttaatcgctttggtcaacgccggctgcgaaatcgccaacgcccggctggcgccgcgaatacttccttcgcgcgcgacctcaacgaaggcgcgaatgtggtgaaatttaatctgaaatgacatgttgtgagtgataaccagtgtttatcagacagaagaaaatgacatctactgtaatcgattgtgctgtggcaggttaaggatgagagtgcatgaaagtgatgagtgataagtaaaggctatcacttcgtgaacaccatcacagtttttgcttataacgggaaaggttatgccgcaactttatgatttcatcaaccagctggcgccaaaaatgaccgaatggcgtcgcgattttcacctgcatgcggaatccggctggctggagttccgcaccgccagcaaagtggcggaagtattagacggtctgggttatcagctggcgctggggcgcgacgttatcgatgccgatagccgtatgggcctgcctgatgaagagaccctggcacaggcgttccagcgcgcccgcgcgcagggtgcgcctgaacgctggctaccggcgtttgagggcggcttcgccggagtggtggcgaccctcgataccgggcggccggggccgacgctggcgtttcgcgtcgacatggatgcgctcgatctcaacgagcagcatgacgatagtcaccgcccgcatcgcgatcgttttgcctcctgcaacgacggtatgatgcatgcctgcggccacgacggtcacaccgcaatcgggctgggtctggcgcacgtgctgaaggagtatgccgcgcagctcaacgggacgatcaagctgattttccagccggcggaagaaggtacccgcggcgcgcgcgccatggtcgcggcgggcgtacttgatgaggtggattactttaccgccattcatatcggtaccggcgtccctgccggcaccgtcgtctgcggcggcgataactttatggccaccaccaaattcgatgtgcagttcagcggtgtcgccgcccacgctggcggtaaaccggaagatggccgtaacgcgctactggcggcggcccaggccgcccttgccctgcacgccatcgcgccgcacagcgccggggcgtcaagggttaacgtcggcgtcatgcaggccggtaccggacgtaacgtggttccctcctccgcgctattaaaagtcgaaacccgtggcgaaaccgatgccattaaccagtacgtctttgagcgggctaaacaggcgatcgccggtgcggcgaccatgtatgaagccagttaccagttgcagctgatgggcgcggccacctccagcgccccgtcgccggcgtgggtggactatctgcgccagcagacggcccaggtccccggcgttaaacaggctgtcgatcgtatcgctgccccggcgggttccgaggatgccaccctgatgatggcccgggtccaggagcgcggcggtctcgcctcatacatgatattcggcacggaactgagcgccggtcaccacaatgaaaaattcgatttcgacgagaacgtgatgaccctggccgtcgaaacgttagcacgcgtcgccctgaactttccctggcagcgaggtgtgtaatggaacacgtttatcaatttgtcgatgacgttattgaggggcggcgcaacgatttttgcgccattgccgatgatatctgggaccatccggaaacccgctttcaggagttctggtcggctgcgcgtttggccgatgcgctggaagcggaaggctttcaattgatccgcaatgccggcgggatccccaacgcctttatcgccagcttcggcgcgggccaaccggtgattgccctcctcggcgaatttgacgccctggcggggctcagccagcaggcccactgcgcggaacccgcgtcttcgacgccgggagaaaacggccacgggtgcgggcataatctgcttggtacggcggcgttcgccgccgcggtcgccgccaggaactggctgcagcaacagggcggcgccggcacgcttcgcttctatggctgtcccggcgaggaaggcggctcggggaaaaccttcatggtccgcgaggggttattcgatgacatcgatgccgctctgacctggcatccggaagcctgggccgggatgttcagcacccgcacccttgccaacattcaggcggcgtggcggtttaccggcaccgcggcgcacgcggcaaactcgccgcatttgggccgcagcgcgctggatgccgtgacgctgatgaccaccggcagcaacttccttaacgaacatattatcgaaaaagcgcgggtgcactacgccatcaccgataccggcggcgtctcccccaacgttgttcaggcgcaggcggaggtgctgtatctcattcgcgcgccggaaatggccgacgcgcagcaaatcttcgcccggatcgagaaaatcgcccagggcgcggcgttgatgaccgagacccgcgtcagctgtcgcttcgaaaaagcctgttccagctatctgcccaaccgcacgctggaagcggcgatgtatcaggcggtttgccattacggcacgccgccctggagcgcggaagagcgcgcattcgccgccgaaattcgcgcaaccttgagcgcgaacgatatcaataacagcctgaaaaacattgccgacaccggcggcgaggacgggaaagcgttcgcccgccgccaccgcgaaacgcgcctgatcgatgaagtggcgccgtgggcggcaacggacaacatccttgcgggctctaccgacgtcggcgacgtgagctggaaggcccccgtggcccagtgcttcagcccctgttttgccgtcgggacgccgctgcactcctggcaactggtgagccagggcagaacctccatcgcccacaaagggatgctgctggcggggaaagtgctgggcgcgacggccattcgtctgttcagcgacagggcgttactgaccgccagccagcaggaactggcgcaggtcttagccgaaaggccctaccggtgccccattccacaggaggtcaagccttcgattttaaaataataaaagccccgtggatggagtacggcaacgcggtaatcgccaaaaaaataacggctgacacgcccaggggtaaagagacaaccaacacaacaacgacaactgaggaacgcccatgagtatgtcatccataccgtcgccttcccccaccggtaagctttatggctgggttgaaaaaataggtaacaaggtcccgcatccgtttttactgtttatctatctgattgtggcgttaatgatcgccaccgccatcctgtcggcgctgaacgtcggggtacagaaccccaccgacggctcgcgagtggtggtgaaaaatttgcttagcattgaaggattgcactggtttttaccgaacgtcattaagaacttcagcggtttcgcgccgctgggggccattctggctctggtgctgggggccggttttgcggaacgagtgggcctgctgccttcgctgatggtgaaaatgtcatcccacgttagcgcccgttacgccagctatatggtgctatttatcgccttctttagccacatctcttctgatgccgcgctggtaattatgccgccgctgggcgccctgatgttcctcgccgtcggccgccaccctgttgccgggctgctggcggccatcgccggcgtcggctgcggcttcacggccaatctgctcatcgtcaccaccgatgtcctgctctctggcatcagcaccgaagcggcaaaaacccttgacgcctcgctccacgtcagcgtgattgataactggtattttatggcaacctcagtgatcgttctcacgctggttggcggattgattaccgataaactggtggaaccgcggttagggcaatggcaaggcaacagcgatgaaacgctgcagacgttgacggcggaacagcgcttcggcctgcgcgtggccggcgtggccgcgctgttattcgtggcggcgatcgcgctgatggtcgtgccggaaaacggtatcctgcgcgatcccatcaagcataccgtgatgccttcgccgtttataaaagggatcgtcccgctcattatctttttcttcttcgtcgtttcactggcctacggcatcgccaccggcaaaattcgccgccaggccgatctgcctcagctgatgattgagccgatgaaagagatggcaggttttatcgtgatggtcttcccgctggcccagttcgtcgccatgttcaactggagcaatatggggaaatttatggccgtcggcttgacggatctgctggagagcgcgggaatgaacggcgtaccggcgtttgtcggcctggcgctgctatccgcctttttgtgtatgtttatcgccagcggttcggcaatctggtcgattctggcgccgattttcgtgccgatgtttatgctgctgggctttcacccggcattcgcgcagattctgtttcgcatcgccgactcatcggtgctgccgctggcgccggtatcgccttttgtgccgctatttctcggcttcttacagcgctaccggcccgacgctaagctgggaacctactactcgctggtcttgccttatccattaatattccttggcgtttggctactgctgctggttggctggtacctcgtggggctgcccatcggaccgggtatttatccgcgattaccttaacgtcgcgacaggccagggaaggccacaaaaacgttaacgccaggtcgtgcggttactgatgactttatacagtccttcaatcgccaaagcgatcagatgaattactaagccgctgataatcacaattacaacgccagtcatcatatattgcatatcaccacctttgttggtaaaaacccgcgcagaaacgccgggaaatcatggactcaaggaaagccagtctgtttatctgccgcgccggatggttgccggtgaattcgccgccggataaaggtagcaaaatcgccttgccaacgcgtctgcgagttaatgtaaaaataaacatcgctttcctcacctcattattaatagtccatgctgaccctgtttgttgaccttttcggagtatggtttgcccacatcgcgtcgtgctatggtgatgccctgccaaaataacctcgctgaaggaggaccgatgctcacgctgttgcaagataaaattgacaccccgctggggccgctgtgggtgatttgcgatgagcagtttaacctgcgggccgttgagtgggatcagcaccgcgaccgcatggagcaactgctggatgttcattatcgccgtgaaggctaccaacgcgttgattcgcgtaatcccggtaacctgagccgtaagcttagcgattacttcgcgggcgatctcgccgttattgacaccttacctaccgccaccggcgggacgccgtttcagcgggaagtctggcaaacgctgcgcaccatcccctgcggccaggtcatgcactacggtcagctcgcggaggcgctgggacgtccgggcgcggcgcgcgccgtgggtgccgccaacggttcaaatcctgtcagtattgtggtgccctgccaccgggtgatcgggcgtaacggcaccatgacgggttacgccggcggcgtgcagcgaaaagagtggctattgcgtcacgaaggctatctgctcctttgaccgtaagtgccttttctggaatcttccggtaattttacaatccaatatcgccagataacttattcataatcaatgagataaaatgggtaactgatttacccttttaatattacgtgtttcaggggttcgagacttacctgctcaccaaaaagatgttaaaattgaccaatatcaattaaagcctgagcagacttatgatcccggaaaagcgaattatacgacgcattcagtctggcggttgtgcaatccattgccaggattgcagcattagccagctttgcatcccttttactctgaacgagcatgagcttgaccagcttgataacatcatcgagcggaaaaagcctatccagaaaggacagaccttgttcaaagccggtgatgagctgaaatcgctgtatgcaattcgttctggcaccattaaaagctacaccatcaccgaacagggcgatgagcagatcaccggttttcatctggccggcgatttggtcggctttgacgctatcggcaccgcccaccacccgagctttgcccaggcgctggaaacctcaatggtctgcgagatcccgtttgaaacgctggacgacctctccggtaagatgccgaacctgcgtcagcagatgatgcgtctgatgagcggcgagatcaaaggcgatcaggatatgatcctgctgctttctaaaaagaacgcagaggagcgcctggcggcctttatctacaatctgtcccgccgtttcgcgcagcgcggcttctcaccgcgtgagttccgcctcaccatgacccgtggcgatatcggcaactatctgggcctgacggttgaaaccatcagccgcctgctgggacgtttccagaaaagcggtatgctggcggttaaaggcaaatatatcaccatcgaaaacagcgacctgctggcgcagcttgctggccaggcccgcaacgtcgcctgatagtcctcccgtatccggccggatcgcgaatttttttctaatttgttgatctggccaggctcatcccctgtttcatttcatccatataggttatctttttaatacagactgtagttacagttgtaaggagaccctgtatggcgaagtatcagaacatgctggtagtaatcgaccccaatcaggacgaccagcctgcattgcggcgcgcggtgtatctgcaccaacggattggtggccgcatcaaagcctttttgccgatctatgatttttcttatgagatgaccaccctgctctcccccgacgaacgcacggccatgcgccagggcgtcatcgggcagcgtaccgcctggatccgcgagcaggcaaaattctatatagagtccggcgtgcccattgatattaaagtggtgtggcacaatcgtcccttcgaagccattattcaggaaatcatcagcgacaagcatgatttagtgctgaagatggcgcaccagcacgacaagctggaagcggtgattttcaccccaacggactggcacctgctgcgtaaatgcccatgtccggtctggatggtcaaagatcagccgtggccggaaggcggtaaagcgctggtggcggtcaatctcgccagtgaagagaactaccacaacgcgctcaatgaaaaactggtcagagaaaccattgagctggcggaacaggttaaccatacagaggttcacctggtgggcgcctatcccgtcacgcccatcaatatcgcgattgagctccctgattttgaccccagcgtctataacgacgccattcgcggtcagcatctgctggccatgaaagcgctgcggcaaaaattcggcatcgatgaaggccgcacccacgttgaaaaagggttacctgaggaggtcattcccgacctgtcagagcatcttcaggcggggatcgtggtactgggtacgattggtcgaaccggactctcggcagccttcctcggcaataccgctgaacaggttattgaccacctgcgctgcgacctgctggcgctgaagccggaccagtaccagacgccggttgagctggacgacgaagaagacgattagtccgttgacttcattcgtggtaataagacgtcatcccccgcccgcgcgggggatttttttgcatcccattaacaaaaataaagggccatttggccccggtttcaacagctttatgggtaacgaaaacgttagtggatacctaagcgccaggcgtgatcgatctcttctttaagctccatggacgaaagcgccattaaatcggcgaactcaagttccagcaatttcagctttttcagatactgcgcgggggttaaagcagcggggtcacggcgcagaaattcgatggccagttgcgtgggggttaactcggtatccataatatcctcagtttgggtgaaaagcagcctattgtaacactttcgcctgattattttatgagcaaataaccccttcgttgcctatataaaaaagccgtctcagaagagacggcttaagaagcacaggttttaaacgagcaggccttacaacgctttcagaatcgcatcgacgctggctttggcatcgccaaacagcatgtgggtgttctctttaaagaacagcgggttttgtacgccagcgtagccggtgttcattgaacgtttaaatacaatgacgttctgcgctttccacacttccagcaccggcataccggcgatcgggctgcccggatcgtcctgcgcggccgggttcaccgtgtcgttagcgccgatgaccagtacggtgtcggtatcggagaaatcatcgttgatctcatccatttccagcacgatgtcatacgggactttcgcttccgccagcaggacgttcatatggcccggcagacgcccggcaaccggatgaataccgaaacgcactttgattccgcgcgcgcgcagtctttcagtgatttccgcgaccggatactgggcctgcgcaaccgccatgccgtagcccggggtgatgatgaccgactgagaacctttcagcatctcagcggtttcttcggcgctgatttcacggtgctcacccacttcttcatcacctgtggacgccgtgccgtcagaaccaaaaccgccggcaatcacgctgaagaacgaacggttcatcgccttacacatgatgtaggacagaattgcaccggaagaacctaccagcgcaccggttacgatcagcaggtcgttgctgagcataaagcccgccgccgctgccgcccagccggagtaggagttcagcattgataccacgaccggcatatccgcgccgccgatggaggccaccaggtgccagccaaacgccagggcaatcacggtcattaccagcaggcacagtacctgcatgccgatgctgtcggtacgcacgaaaacgatcagcagcaggaaagaaacgaccagcgccgccaggtttagcttatgacggttcggcagcatcagcggcttagaagacatcttgccgcacagcttgccaaacgccacaacggaacccgtaaaagtcaccgcgccgatgaagataccgaggaacacttcggtcaaatgaatattgaccagaatctgttccataccggtttcatgctgcagatagctgttaaagccaaccagtaccgccgccaggcccacgaagctgtgcagaatcgccaccagctccggcatctcggtcatttcaactttcttcgccaggcgaataccgatcgcgccgccgataaccatcgccagcaggatccacgcgacgttgctgctatccggccccagaatggtcgccaccagcgcaatcgccatcccggcaatgccgtagtagttcccctgctgggaggtttcgtgtttggaaagccccgccaggctaaaaataaacagaatcgcggcaacaatgtatgcagctgtaactaatccaccagacatttgttaccccttatcctttgcggaacattttcagcatgcgctgagtgacggtgaaaccaccaaaaatattaatgctggcgatcagcaccgcgataaagctcaggaagctgacccagccgccgtggcctatctgtaacaatgcccctaccacgataatgccggaaatcgcgttagtgaccgacatcagcggcgtatgcagcgcatgggagacgttccatacgacgtagtaaccgaccacgcaggagagcgcgaaaacggtaaagtggccgaggaactctttcggcgccacgcttgccagccagccaaacagaataatcgccagcgccatcagcgcatacttgcgcagcggcgagctcggtttcgcctctgcttttggcgcttcaacctttttcgctgccgcctgcggctgagcagatacctgaatgggtggagcgggccaggtgatttcaccctcgcgaaccacggtaacgccgcggataacgacatcatcaaaatcgataacgacattgccgtctttctctttgcacagcagcttaagcaggttaaccaggttggtgccatacagctgtgaggactgcgtcggcagacgaccagggagatcggtataaccgataatcttcacgccgttggcggtggtaaccacctggcccggcacggtgtattcacagttgccgccgttttgcgacgccaggtcaaccaccacgctgccggacttcatggagtcaaccatctcgcgggtaatcagcttcggcgccggtttacccggaatcagcgcggtggtaacgatgatgtcgacatctttggcctgggcggcaaagagcgccatctcggctttgataaaggcttcagacatgactttggcatagccgtcgccgctgcccgcttcctctttaaaatccagctcaaggaactcggcgcccatactctgcacctgttctttcacttccggacgggtatcaaacgcgcggacgattgcgccgaggctgttagccgcgccgatggccgccagaccggcaaccccggctccgataaccatcaccttcgcgggaggaaccttacctgccgcggtgatctgcccggtgaagaagcggccaaactcgtgggcggcttcaacgattgcgcgatagccggcgatgttagccatcgaacttaacgcatccagcgactgagcgcgcgaaatacgcggcactgaatccatcgccatcacgttgatgttgcgcgccgccagtttttccatcagctgcgggttttgcgccggccagatgaagctgatgagcgtcgtgccgggattaagcagcaggagctcttcgtcatcgggcgcgttcactttcagaatgacgtcggactgccagacgtcatcatcgctaacgatctccgctccagcctgaacgaaggcctcgtcgtcgaaactggccagcttacctgcgccgctttctaccgcgacgctgaacccgagtttcagcagctgctccaccgttttcggcgtggcggcggcccgggtttccagggctagtctctcttttggtacaccaatacgcatagttttcccttccatcggtttttgatgatggtttacttttcttacaaacgaccgtcgcgaaggcggatgaacgtgccttccaacatatgtctgaaaaaataaaacagtaacaaactttttataacctactgaaaataccgattgtgatctacagcaataaaacagaaattttgattttattggtaaaacgcacggctaaccgtgccaggcagcaatatttaccttatttttatgccagcgcctgataatccgcttggcagaggggttaattcaccatttatcgccgtcttgaacatcgtattaacattacgttaacttatgaaagtgatatcgattatcgattttgctggtcaagcggctgttttttcaacatatcgaaaaatgttatatttctgcagtatacgtttagggcgacaactgaaaattgacgcagacagtcactcacgataaatgcaataatcaaatgttttcagtcaacaacaataccagtacatggtttgcgcaaggcaaaggattatttttatgaagcttaagaactcactcctggcgtctgctcttctggctacaaccgcgttgtctgcccatgcagcgaccgagctgactccggagcaggcggcagcgctgaagccctacgatcgcgtagtggttaccggccgttttaacgccattggcgacgcggtgcaggccgtttcccgtaaagcggacaaagaaggcgcagcatccttttatgttgtcgacacgtctgattttggcagcggcggcaacctgcgcgtaacggccgatttttataaagaaaatgccccgcaggccgacgcgccgaaaaatcgtgtgattaacggcgtaatggaattaccgaaggaccaggccgtcgagctggagccgtttgataccgtcaccgtacagggcttctaccgcagccagccggaagttaacgacgccatcaccaaagccgctaaggccaagggcgccgcctccttctttatcgtgcgccaggttgatgccaaccagggcggcaaccagcgaatcaccgcctatatctacaaagccgatgccaaaaaacgcgttctgcaaagcccggacgctatcccggcagattcagaagccggtcgcgctgcgctggcggaaggcggagaagccgcgaagaaagtggagatcccgggcgtagcgaccaccgcagcggtcggttccggcaccggcgtaggccgcttctttgaaacgcaatcatctaaaggcgggcgttacaccgtcactctgccggacggtaccaaagtcgaggaagtgaacaaaatcaccgccgcgcagatggtgccatacgacagcatcaagttcaccggtaactacggtaacatgacggaaatctcctaccagacggctaagcgcgcggcgaagaaaggcgcgaagtactaccacattacccgccagtggcaggagcgcggtggcaacatcaccatcagcgccgacctgtataagtaacggcgtctgagctgaacaaaaaggcggcgatctgccgccttttttctttttttcatttctcgccattgcatgcatacaaaacactccgtaaaatcccgcgccttagcgcaatcctccatttttatgcgatttcgccaaataaatattcttagtttgatgattgtcacctcgggaatgcaatggaaaagaaactgggccttagcgccctgaccgcgctggttctcagctcaatgctgggtgcaggcgtattcagcctgccgcaaaatatggcagccgtcgccagcccttccgcactgcttatcggctggggtatcaccggcgtggggatcctgttcctcgcctttgccatgctgctgctcacccgcattcgccccgaactcgacggcggtatttttacctacgcccgggaaggctttggcgagttgataggcttctgctccgcctggggctactggctgtgcgcggttgttgccaatgtctcctatctggttatcgtcttctctgcgctaagcttctttaccgatacccccgagctgcgcctgtttggcgacggcaacacctggcaatccatcgtcggcgcctccgtcctgctgtggattgtccatttcctggtgctgcgcggtgtacaaacggccgcgggtatcaacctggccgcgacgctggccaaactgctgcccctcggcgcgtttatcgcgctggccgccatcgcgtttcgtatggagacattccgcctggatttcagcggcctggcgctgggcgtaccggtatgggagcaggtgaaaaacaccatgctgatcaccctgtgggtttttatcggcgtcgaaggcgcggtcgtggtttccgcacgcgcgcgtaataaacaggatgttggccgcgcgacgctgctggcagtactctccgcgctggcggtctatctgctggtgacgcttctctcgttaggcgtcgtgccgcgtagcgagctggcggaaatacgcaacccctcaatggccgggctgatggtcaacatgatgggctcatggggggagattgttattgccgccgggctgattatttccgtctgcggcgcgtatctgagctggaccattatggcggcggaggtgccctatctggcagcaacgcataaagccttcccgcgcctgtttgcccggaccaataaaaacaatgccccgtcggcttcgctgtggctcaccaacgtcagcgtacaggcttcgctggtattgatttggcttaccggctcagattacaacacgctgctgaccatcgcctctgagatgatcctggtgccctactttctcgtcggcgcatttttgctgaagattgctgagcgcccgctgcacaaggccgtcggtgtcggtgcctgtatttatggcttatggttattatatgcgtccggccctgtgcatttattgttgtcagtgatactttacgctccgggtcttctggttttcctgtatgcccgtcgtacacaccagcacgatcgcccgctcaaacgccgtgacctggcattaattggttttttgctggttgccgccgtaccggcaacgtggatgttggtagggtaagcggttaccctgccgctgaactcaaaggagatacccatggctgatatccagcctcgtccaatcctgattaccggcgggggccgtcgtatcggcctcgccctggcccgccattttctggcccggcagcagcccgttattatcagctaccgcacctggtatcccgccgtcgacgcgcttcgtgaagcgggcgccgtttgtctgcacgcggatttcagcactgacgatagcattctggcgttcgccgaagaggtgaaggcgcacgccggcagcggtctgcgcgccatcatccataacgccagcggctggatggcggaaaagcccggggtgccgttaaccacggtgctcgccagcatgatgcaaattcacgtcaacgccccctacttgctcaaccatgctctggagagcctgcttcgcggccacggccatgcggccagcgacattatccatatcaccgactacgttgtggagcgcggcagcgacaaacacattgcctacgccgccagcaaagcggcgctggataatatgagccgctcgttcgcccgcaagctggcgccggaaattaaggtcaatgctatcgccccttcgctgattttatttaacgaaggcgatgacgcggaataccgcaagcaggcgcttgataaatcgctgatgaaaatcgcgccaggtgaaaaagagatcagcgacctgatcgaatacctgttcagcagccgctacgtgaccggtcgctcatttgccgtcgacggcggccgcaatctgcgctagtggaaacgactccagccgataattaacagccacgcgcagaggctccagcaccccactgcgcctgccagagcgaacggcaggcgcataacgccggtgaaataccatagcgagagcaaatagataaagtacggaatgatcgaccacatcccgaatacgatggtggttcgcagcgcttcgatcccccgttcgctggcaacgatatagttcgcgatcagggcgaaagtcggaaagagcggaatcaacccggcgatatagtagttcttcgttttagacagcacgccaatcaggacaacgaccagcgcgccgagcagcgcttttatcaacaaccccataccttttgccttaacatttaaacaacaagaccccgcagcataacggaagcgccgacaattataaacgcgcaagagcggccgataccgtgtagaagcaaaagacctattttttagcggtctcatcactgacgccagcccctatgccgaatatccgcagctggtattaaacgtacgcaaggatgatatccctggcaagcgagcacgttattcgaagaccgttttcgctgccttaaaaacccttcggctaaatacacacattaaaccgaaaagagaatattttttctgattgttgagttatacgtataacatattatttttcgtatttttagatacaaatcaaattagcctattttcggctcatctccccctcacgtatttacacagattttaaaacctgaagcgctttactgacgggcatttacaaaatatccaactcaataactgcaccgcttcagtgcagctagtgatctgcactaaatgattcaaatcaatactggcgaaatagcttaaaagttgttaattgatatggttgatttttatcataaggggttattttgaaattattctttttgcgcaaatcctgaataagcgcacatagccattttttagcaaaatggctaaataaaaccaattattttgatttacatcaatataaaaccgatttcacaaggaagcatactttgccgttaataacaggcacggtagtagatatgatcgtaattatatgattttacaatctttcgatctgttcctgatatccgcaacagaattttattctgttcacaatcctcaacgcagccatttagttcagctcatgccagtttttcgaatcttttacttgttgctattatcattactagtattagacactcatctgattgttattattttatattaatcagcatcagaaccagttaaaggaatctccatgttcggacctgcttcacgcaaagtaaaaatggccatgaacttcatcaaaatatattcatcaacgcgaaaatgctcgtaaattaccggagagcgtcaagcatgcagtggaatattgaaaatagccttgtatgtcctgtaacaggaacaggtttttcagttgcggcaagtgccaaaaatctgaaattaattatttggtatagtggagattattttttgagcattggttcggttattaacatcacacaaaatgaagttttcattaatggtgtgcccggcgatttacaggttattcatgcattcccctatacggaaaatttgtggtcaacattttcaaagaatattgaatgccccggtaatcagaaccctatgctgctcatctgcaatcgaagaagcctctgcaagttcgccttgtgcccctacggcgccaggcaaaagaggccgcaataaggcttccccctcattcgcgctagcgtaccggtacttattttctatgtgggcacgtgctgtcctgacagcccgtgcccacattgtgccgcatcctgttcccttaatgcgcaatgcttctgctcgtatctgaatcattgtctggctccgcaaaaaatagtcctgaaccgcagctccgggaatcatagcgaatttcatggctaatatatagctcatattaatgtccggatggtttacaatggcggtagcgaatgaataggcacctgacttcagatactgaatgcgccacctcagccgcgattcaggtacagagattcaagcgattaaaagatgagtgcaggcatacacaatatgaataaaattgttttcgttgaggatgatgccgaggtcggcgcactgattgcggcctaccttggcaaacacgatatggacgtggtggtagaaccgcgcggcgatcgggcggaagaggttatcgcgcgcgaaaagccggacctggtgctgctggatatcatgctgccgggtaaagacggtatgacgctgtgccgcgatttacgcggccagtggcaggggccaatcgtattgctcacttcactggacagcgatatgaaccatattctctcactcgaaatgggcgccagcgattatatcctgaaaaccacgccgcccgcggtgctgttagctcgcctgcgcctgcatttgcgccagcatatcgccgtgccggacggcagcgtcccctcctcgctcaccccgcataaagcgatcgcttttggctccctgagtatcgacccggtgaatagacaggtgatgctcggcggcgaaagcgtcgccttatccactgcggatttcgatctcctgtgggagttagcgacccatgctggacaaattatggatcgggacgcgttattaaaaaatctgcgcggagtcagctacgatggtatggaccgcagcgtcgatgtcgccatctcgcggctgcgtaaaaagcttctcgataatgcgactgagccatatcgtatcaaaacggtacgcaataaaggttacctgttcgccccgcacgcctgggacaattaattttggcatatggcgatggaatagctgtttgtgcggagttagccgtcagagccaattcaacctcctgttaattatttttaaaacagggggtgaaattgcttttcccacgcaaaacccgcgcttcaccgcgcggcgcgcctcacgacttgccgggcgggtgatactctttgcagacaatcaacggaaaacattctactgtggagtgatagcgctggcgcctggccagtatcgacacccgtcgtgagtatagagattcacaccttcagtgggttgggatgaccgcaatatctactgcacgggagcatctatatgttgaacgatctcagcagcgatgaaagcaaaagacgcgcggcgattgacctgttaaaaaacgcggacgaagggcgagacgaagcgttaaaaaaatacactcatctggtctgccagttgctaaaaatgccaatgagttttgtgtcaatccttgacgatgaaaagcagtacatcaaatccgctcagaatatcgcccccacggacaccagcctgggcggagcattttgcgaacagaccctgaaacagggtgagactctcctttgtcctgatacgcatcagcacccgatctttcatcgcgatcgggcggtcagagaagcgccattcattcgcttttatgcaggatgcccgctgaaaacccgcgacggagtgaccgtgggtaccttgagtatcttagatacgcaacccagggcactttcagatgagcagatcgctatttttaaggcgctggccgagctgatatcggatttcttagcctcctggcactcagtggggtatatcgacgtcgtcacgcttttacccaatcggcagcgcctgctcaaggacattgaggtgtcggcggagggtactttcaggctggtcattattgactgcattgatatgccatttgcctacgagatggcccgctcattggggatgctggcggtagagaatttgcttcgtgacatgaccgtcgcgctgcaggcgcgcctgcccatggcgagcaaactttacgccgtggcggttggacgctttgcctttttcaccccggaacccatggcgctgtcattggagggtatagcactacggcttcagggaacccaggccaggatcggcccggacgttcccctggatttgaatattcacatgggtgactccggtatttgcgatagcgacatgacgccaaatgaaattctgcggcgcgcggtgagcgcactgcatgaagcgataagccaggggcaccgttttacgacctataatgacgcactggacatccgcaagaagcgagatttcagcctgctcaccgaactcaggcaaacgctgcagggaaaccaggggttatatctggtctttcagccaaaaatttcgctgacgacgggagacgtgacgggcgctgaagccttgataagatggaagcatcctatcaatggcgaagtgctgccgggtgaatttattccgctggtcgaaaagactagcctgatgcgcgaactctcggcctgggttatcgatcatactatcgcgcagttgagtgactggcgggatcgggggctttctcttcccgtctcaattaatctcgccgccagcgatttttctcgacccgatttcgctgaggagcttgagcagaaactgcgggaggcgtgtcttgacccagccctgctgggggtggagtgtctggagactgagaagatgcttgaaagtccggccgcgctgaacggactggacatgctcaaaaaacgcgggtttaaaatttctctggatgactttggatcgggatacagcaacattaattacctgcggcaaatcccgctggacatcatcaaactcgaccggtctattgtgaggcatatagtccatgagaaagccagccgcattattgtgcacaacgttatcaggctcctcaagcagctcgattacgtcgtccttgccgaaggcgtcgaggatctcgaaacggttgagattttacgcagcctgggctgcgatgaggttcagggatatttttatgcccggccgatggtctccgttgattttgccgcatggtatcgcaccagaaaggcagaccagggaaagaaatcctgagacgaacgactcttttcaatgttctttcagtatatgaaccaatccagcgataaagacgcgcaacgggcgctgcactgaggaacacgatatgactaccttttaccaattgactgccaccagcctgcacggccagcccatctcaatggctgactatgctggcaagctcgttctggtggtcaatactgccagccagcaatatgcagggctggaagcgctctatgcgaaatacgctgcccatgggctgatagtgcttggtttcccctgcaaccagtttggtaagcaggagcccggcggcgtcgatgacatcgagcagacctgtcggatcaattacggtgtaagcttcccgatgttcgagaaagtggaggtcaacggcgccggcgcgcacccgctgtttcgttacctgaaagatgagttacccggcgtgctgggcgggcggatcaaatggaacttcacgaagttcttgatcggtcgcgacggcacccctctcacgcgtttcgcgccgttcaccaccccggagaaaatggagaccgccatccttgccgcactaaagatttaaatcttttgcctccctgaccgctgcctgtgcgcgagtgaatgttcgctccgcgccggaagtgcgcctggaaaaatgacaatgggttaggaataagtcccgcgcacgcgatacaaatcactcatttttcagcccaccacacgccagatatttctcttttctgcgagttaagccatctattaaaacaatacctgcccggcaagatgacctattcccatcgacgaaaacatcgccagggtgctccagaaagtaattctgccgatcgccctgacaggagaggctctgctgacaattgaagatatatagccaagagcggccagtgaaaaaagggaggagagaataacaaagagaaaaaccagcgttgctggagaaagccatgcaacgactaaaggcaacgttgcgccagcggaaaaactcagcgccgagaaaacggcagcctgcagggggcgcgcagaattggtatccgtcagtcccagctcctcgcgggcatgcgtgtccagagcatctttcaccatgagttgttcggcaaccttttgggcaagctctggctcgagtccgcgttgcacataaagtaaagtcagctcgcgtacttctccctgataatctgtttccagttccctcttttcctgagcgagaaccgcgttttccgtgtcggcctgagatgagacggaaacatattcccccgcggccatcgacatcgcccccgcgaccagcccggcaatgcccgccagtaaaaccccggaagagcccgtattagcagacgcaacgccaagaacaaggctcgctgtcgaaacaataccatcgttagccccgagtacagcagcccttaaccatccgacgcgttcaatgctgtgtcgttcaagatgcatgcttttattctcctttaagtacgcctgttcagcctggcggaatgagggtggaataaaacggattaaaacagagaacgcttcgcacatcggcgccgaccgaggtacattacattcttctctgatttggcttcaacccacaccatcatacttatgcgtgccggatgttgtcagccgcagcgaaccctgctttcatagcaaatcaaatgggcataaaacgcaacaagggtttttcacgtagattgcgcctggataaatgcccccgcagtgcccctgcaggtaaaagcaggaatttaaccttttgattttgagtgatatttaatgaaaaagctgtttgtgcagttttacctcctgctgttcgtctgcttcctggtcatgaccatgatggtgggcctggtgtacaaattcaccgccgaacgcgcagggcgtcagtcgctggacgacctgatgaaaagttcgctgtatctgatgcgcagcgagctgcgggagatcccgccgcgcgactggagcaaaacgctcaaagagctggacctcaatctctctttcgatctgcatatcgagcccatcagcaaattcaagctctcggaaaactcgatgcagcatctgcgcgccggggatatcgtcgccctcgacgatcagtacacctttatccagcggatcccgcgcagccactacgtgctctccgtcggtccggtgccgtatctctattttttgcatgagatgcgcctgctcgatctggccctgatggcttttatcgccatctcgctggcctttccggtctttatctggatgcgtcctcactggcaggagatgctgcgtattgagaccgccgcccagcgcttcggcgacggacatcttactgaacgcattcatttcgacagcatgtccagcttcgcgcggctgggggtggcgtttaatcagatggccgataacatcaacgcgcttatcgccagcaaaaaacagctgatcgatggcatcgcccatgaactgcggaccccgctggtgcgcctgcgctatcgcctggaaatgagtgagaacctcaccgaagccgaatcgcaggcgttgaaccgcgatatcgggcagttggaggcgctgattgaagaacttctgacctacgcccggcttgaccgcccgcagaacgaactgaagctaacgacccccaatttcccggcgtggatccgcgatcacgttgaagatattcagacggttaatccccagcgcgagattgcgctaaccgacgtcgtggccgggagttacggcgcgctggatatgcgcttaatggaacgggtgctggataatctggtgaataatgccctgcgctacagtaaccagcgtattcagatcagcctgacgctgcaggcttcgcgcgcgacgctgcgggtcgaagatgatggccccggaattgcgcctgatgaacgtgagcgagtgttcgagcctttcgtacgcctcgacccgagccgcgatcgcgcgaccggcggctgtggcctcggtttagctatcgtccacagcatcgcccaggcaatggccggagaagtgcattgcgaagcgagttcgctgggcggggcctgtttttgctttagctggccggtctatcatcagttgccggattttacctccgcctgatacgcctttgcgcaaaagctgaggcctgctatagttaaaaaatcgctaagtatgttgtaactaagatggggaaatatggccagctatgaccttgttgaacgtctgaacgacacctttcgccagctcgagcatgaactgcaggcgctaaaacacgccctgagccagtgccgcctgctggccgcccgcgtctttgagctgccgccggtgagtaaagacgcagaacaccagccgctggagagcatcaacgtggttcagcacaccggcaaaaccgcgctggagatggcgctcaggcactatagtcatctgtttatccagcagcagtcggaaacccgcagcagcaaagccgccgtgcgtttacccggcgcgatttgtctgcaaactgacgcccgggaacaggctgaactcttagacaaaatcacccatatcaacgccctcaaagcgcgcttcgagaagattatcaccgtggattccggcctgcctgccgccgcgcggtttgagtgggtccaccgccacctgccgggactgattacgctgagcgcctatcgcacgctaactcccctcctcgatccgagcaccatccgcttcggctgggccaataagcacgtgattaaaaatctcacccgcgatcgggtactcatgcagctggaaaaaagccttcagtcgccccgggcggttccgccgtggacccgcgagcagtggcaaagcaagctggagcgagagtatcaggatattgccgccctgccgcagcgggcaaagctgaaaatcaagcggccggtgaaggtgcagcccatcgccagggtctggtacagcggggaacaaaaacaggtgcaatacgcctgtccgggaccgatgattgcactgatatccggcaccaagggcgtcagcgtgccggacctcggtgaactcctgaactatgacgccgataacgtgcagtatcgctacaaaccgcaggcgcagtcgctcaggctactgattccgcggctgcacctgtggctggctagcgagtagacatactgcccaccatctcttccgggcgtacccagcggtcaaactcggcttccgtcaggtagccgagcgccagcgccgacgctttcagggttaacccctctttatgggcctttttggcaatttccgccgctttgtcatagccgatatgggtattcagcgcggttaccagcatcagcgactcattcagcaactggctgatgcgttcacggttcggctcaatgccttccgcgcagtgctcgttaaagctcgccatcccgtcagccagcagccgcaccgattgcaggaagttgtggatcaccatcgggcgatagacgttgagctcaaagttgcccgatgcgccgccgatattcaccgcgacatcgttgcccatcacctgacagcacagcatggtcagggcttcgcactgggtcgggttcaccttgcccggcataatcgacgaacccggttcattttccgggatcgcaatttcgccaatcccacagcgcgggccggaggccagccagcgcacatcgttggcaattttcatcagcgaagcggccagccctttcagcgccccgtgcgcgtgcaccagcgcatcaacggtcgccagcgcttcaaacttgttcggcgcggtgacaaacggctggccgcttaaggccgccagctcggcggcgacgcgtaccgcatattccggatgggtattgagcccggttcccaccgccgtcccgcccagcgccagctcggccagatgcggcaggctatgatcgagatgttttaaattgtgctccagcatggctacccagccggagatctcctgaccgagggtcagcggcgtcgcatcctgcagatgggtgcggccgattttgacaatatcgctgaaggcaacggctttattgttcagggtctgcttcagcacgttgagctgcgggatcagcttctcccgcagggcaatcatcgccgccacgtgcatcgccgtcgggaacacgtcgttagagctctggctcttgttgacatcatcgttggggtgaatcttacgctccatcccgcgcggcccgcccagcagttcactcgcgcgattggccagtacctcattcatattcatgttgctttgcgtgccggagccggtttgccagatagccagcggaaactcgtccggatgtttgcctgccagcacttcgtccgcggcctgaataatcgcttgcgctttctccgcggccagaaggccgagatcgttattcaccttcgccgctgcgcgcttggtcagcgccagcgcataaataagctcggccggcattttttccgtcgaaatacgaaaatgttccagcgagcgctgggtttgcgcgccccatagcttgtcggcaggcacatcgatggcgcccattgagtctttttcactgcgatgcgttgtcatgactttctccttggattcaacgtgcgtaatagcgacaaagctcacctgctcaaagggtaaagtatgggtcagatttataagttgttttggtggttcgtgccgctaagcggcataaaaaaaccgccccgaagggcggctgaaatcattttacgcagcgggcgcactgcgagctctggatttgctggaagaagtcgttgcctttgtcatccacgaggataaacgccgggaagtcttcgacttcaattttccagatggcttccatccccagttcaggataggccacgcactcgaggctgcggatactctgctgcgccagtaccgccgccgggccgccgatgctgccgaggtagaaaccgccgtgtttatgacaggcgtcggtcacctgctggctgcggttgcctttggctaacatgattttactcgccccgtgcgcctgcagcaggtcgacgtaggagtccatgcggccagcggtcgtcgggccaagggagccggacgcgtagccgtcgggcgtttttgccgggcccgcgtagtagatcgggtggtctttgacgtactgcggcaacgcctcaccgctgtcgataagctctttcagcttcgcgtgggcgatatcgcgggccacgataatcgtcccgctcagcgacaggcgggtcgacaccgggtactgcgacagcagcgccagaatatcgctcatcggctggttgaggttgaccttgaccgcctcgccctcgccggcctgacgaagatgctcgggaatatatttgcccggattgctctccagtttctcaatccagatcccctggcggttgatcttggctttgatattgcgatccgccgagcaggagacgcccatgcccaccgggcaggaggcgccgtggcgcggcaggcgcacgacgcggatatcgtgggcgaagtatttgccgccgaactgcgcgccgagaccgaggttttgcgcctccaccagcagttcctgttccagctgaatatcgcggaaggcctgaccgtgttcgttgccttcggtcggcaggccgtcgtagtacttggttgaggccagcttaacggttttcagggtggactccgccgaggtgccgccaatgacgaaagcaatatggtacggcgggcaggcggcggttcccagagtgcgcattttttcgacgagatagtttttcagcttcgccggggtaattagcgctttggtttcctggtacaggtaggttttattcgccgagccgccgcctttggcgatgcagaggaatttgtactcctcgccgtcggtggcgtaaagatcgatctgcgcaggcaggttagtgccggtgttgacctctttatacatatccagcggcgcgttctgcgaatagcgcaggttatcctggatataggtgttataaacgccctgcgccagcgcggcttcatcgccgccgccggtccacacgcgctggccttttttgccggtaataatcgcggtaccggtatcctggcaggtcggcagcacgcctttggccgcgatatccgagttgcgcagaaactgcagcgccacgtacttatcgttttcgctggcttccgggtcgttgagaatatcggccacctgctgctggtgcgccgggcgaagcataaaggaggcgtcgtggaaagcgtgttgtgccagtaaagttagcgcctgaggttcaactttcagaacttcctggccggcgaattcggcgacggagacgtaatcactgctgaggaggtagtactcggtatcgtcctttttcagtggaaaaggatcctgatatacaaacggtttattcgacattgtgctctcacttactgcttagctgattatatttcaggcagacactccatttgcccgtggaaaagcgagtcgatcgattttacacaattttttaacaaaaactgagacaaggacgactttttcttcgcgccggttgcttatcggtcgattgctggtttaatagtgccatgactattaagtggaaacagggattgagaatgcaaaagctcattaactcagtgcaaaactacgcctggggaagccataccgccttaaccgaactttatgggattgctaacccggacaacctgccgatggcggagctgtggatgggcgcccatcccaagagcagctcgcagattgtggataatagcgggacgccgcgctctctgcgcgacgcgatcgaaagcgataaagcaaccctgcttggcgcgaaagtcgccgagcgttttggcgaactgccgttcctgttcaaagtcctgtgcgccgcacagccgctctctatccaggtgcaccccaacaagcaggcctcggagatcggttttgccaaagagaacgctgccgggatcccgcttgatgccgccgaacgtaactataaagatccgaaccacaagccggagctggttttcgccttaacgccgttcctcgccatgaacgccttccgcgagtttgccgaaatcgtcaccctgctgcagccggttgccgatgcgcatccggcgattgcccagttccttgcgcagcctgacgccgggcatcttagccagctgttcgccagcctgctgaacatgaaaggcgatgaaaaagcgcacgccttacgggcgctgcaggcggcgctggacagcgaacagggtgagccctggcagactatccgcctgatcgccgagttctacccggacgatagcggcctcttctctccgctgctgctcaacgtggtcaaactgaatcccggcgaggcgatgttcctgtttgcggaaaccccgcacgcctacctgcagggcgtggcgctggaagtgatggccaactctgataacgtgcttcgcgcgggcctgacgccgaaatatatcgatattccggaactggtggcgaacgtcaaatttgagccaaaacccgcgggccaactgctgacccagccggtaattcacggcgcggagctggacttccccatcccggttgacgattttgccttctcgctgcacgacctgtcagcgcaggcgtcaaccatcgcccagcagagcgcggcgatcctgttctgcgtcgagggtgaggcgacgattgccaaaggcgaacagcgcctgacgctgaagccgggtgaatccgcgtttatcggctgtaatgaatcaccggtgcaggtcagcggccgcggccgcgtggcgcgcgtgtttaataagctccagtaagttactgaactttttagccacagttgctagactttcacccatcatgacaacacaaccaggcggcccgatccgcctggtttcatttatggacaaatgctatgaaaaaatcgctggtcgcagcaggagttatcattgcgctgggcgtcgtctggacgggcggcgcgtggtatacggggaagcagctggaaagccgcattgccgacatggtgcagcaggctaatgctcagctgcaaagcagcgcgccgcaggctggcgtggagctgacgtatcagggctatcagcgcggactgttccgcagccatttacagctggtgctgaagcctgctgccggcaaagcgccccgctggcttgccgcaggacagtcgctggtgtttgatgaagtcgtcgatcacggccctttcccgctggcttcgctcaaatcctttaacctcgccccggcgatggcgtccgtcaaaaccaccctgaccaataacgacgccagcaaggcgctgttcgacatcgctaaaggcgaaacgccgttcaccattgatacccgtatcgcttatagcggcgacaacacatccgctattgtgctcaacccgcttgattacgcgaaaggcgatgagaaggtgaccttcagcggcggacagttccagctggacgctgaccgcgaagggaaaaccctcagcctgagcggcgaagccggtagcgggcagattaacgcggttaacgagtacaaccagaaagttcagctcacctttaataacctgaaaaccgacggctctaccgaaatggccagcttcaacgagcgtatcggtaaacaggctatctcgctggacaagctggcgattggcgttgaaggcaaagagctggcgctgttcgaagggatgaaaattgacggcaattcgtcgctgactgccgacggtaaaggtattaacagccagctggactacacggtcaacagcctcaagctgcaaaatcaggatatcggtagcggccggctgacgctgaagctggacaatattgatggcgaagccttccatcagttcagccaaaaatacaacgctgaagcgcagacgctgatggcggatccgcagctggcgcagaatcctgagctctatcagcaggcgttaacgcaaaccttctttagcgcgctgccgatgatgctgaaaggcagcccgtccctgaccatttcgccgctgagctggcgcaatgcgaagggggaaaccaccctgaatctttcgattctgctgaaagacccgtcgctgaccaccaccccgccgcagacgctggccgatgaggtggatcgtagcgttaaatcgctcgacggcaagctggtgatcccggtggatatggcgacggcgtttatgacccagattgccgggctggaaggctatcagcccgccgacgccgctaagcttgcggatcagcaggtgaaaggcctggcggcgatggggcagatgttccgcatctccaccatggaagataacgccattacctcaagtctgcagtacgctgacggccaggttacgctgaacggacagaaaatgccgctggatgagtttgccggaatgttcggtttagcgcttcccgccgtctctgaacccgcagcgccgcaggaaactcagccgcaagatgacgcgccgcaagacgtggtgccacccgccgcgccgcagcaataaacggcaaatagcccctgcccaggggctattttcgggtaatcagccggggagaaataatctggtttctcgccgcgccctgtccctcttccatacgccgtaaaatacactccgcgaggctttgtcccagctcccgggcgggcgtcgtcacccaggtcagcggcagatcgtccagcgcctcctcgggtaactccgcaaaggccgccagcgcgacccgctgttcaaaatagctttcgacgccagcttcgccgctctggcgcccggcgcgcatcagcccaaaccacgccccggtggcaatcacgctgttgtagcacagcaccgcgctaatcgttgggttttgccgcagcagcgccgccatcgcctctgccgcctgcttctggctcgactcgcactccagcacccactcgctatgaaacggcaggccatacttcagcagggtggcgcagtagccgcctacccgttcggcgcgcgtcagggacgagctctgcccccccagccaggcaatgcgctgatggccgcggcggatcaggtgctcggtgacaatctgcgccgcctgcatattatccgggcggatcaggtcgacatcgtcgagatagctggcgcgggaagcaaacaccagcggcattccagcttgcgccgcgcgatcgcgcagctccgctccctggtcgatcgccccggcaatcaccacgccgtcgaccccttgcgccaccagggtatcaaaacgctggagcattttttcaccgctgtgccccccctgggtgagaaacaccattctgccctgcgactcaagcgcgtcggtcaatccggcggtcatctccgcgtagaaaggcttcgataagtcgctgacgatcaggccaataacaccgctctggccgccgcgcagcgacgccgcctggcggttgcgcacgaagcccagctgttcaatggcatgattgacgcgctcgccggtcgccgacgaaatacgccccttgccgctcagcaccagcgataccgtactgaccgacacgcccgccgcctgggcgacatcattaatagtgatttttttcgcgatagccataactgcaggccgactccctttggctgtcgataaaacgttttatcaagatactctctttataaacgttattatcgccggaatatgtgatttttatcgcactaaaatttggtaaaacgttttatctttccgtggcgttacatcctaccgataacttaaagaaccaggattcgtgttatgacggcgaaaacagcaaccaaaattaccctgtgggagtttttccagcagttagggaaaaccttcatgttacccgtggcgttgctctccttttgcgggatcatgctggggatcggcagctctctgagcagccatgatgtcctgacgctcctgccgtggctggacgtgccgctgctgcaggccgtattcatctggatgggcaaagtcggctccttcgccttcagctttctgccggtgatgttctgtatcgccattccactgggtctggcgcgagaaaacaaaggcgtcgccgcgtttgccggttttgtcggctatgccgtgatgaatctggcggttaacttctggctgacagccaaaggcattctgccgaccaccgatgccgccgtcctcaaagcgaacaacatccagaatattatcggcattcaatcgatcgacaccgggatcctcggcgcggtgatcgccgggatcatcgtctggatgctgcatgagcgttttcacaatatccgcctgcccgacgcgctggccttttttggcggcacccgctttgtaccgattatcaccaccgtggttctcggcctggtcggtctggtcattccgctgatctggcccgtcttcgccatggggattaatgccctcggccacgtcatcaatagcgcgggagatttcggaccgatgattttcggtaccggagagcgcctgctgctgcctttcggcctgcaccatattctggtggcgctgatccgctttaccgaggcgggtggaaccatggacgtttgcggccatagcgtcagcggcgcgctgacgattttccaggcccagctcagttgcccaaccacccacggcttctccgaaagcgcgacccgtttcctctcgcaaggcaaaatgccggccttcctcggcggcctgccgggagcggcgctggcgatgtaccactgcgctcgcccggaaaaccgccataaaattaaggggctgctgatttccggcgttatcgcctgcgtggtaggcggcacgaccgagccgctggaatttttattcctgttcgtcgccccggtgctgtacgttatccacgcgctcctcaccggactgggctttaccatgatggccattctgggcgtgactatcggcaacaccgacggcaacgttatcgactttgtggtgttcggcattctgcacggtctgtcaaccaagtggtatctggtaccggtggtcgcggccatctggtttgcggtttactacggtatcttccgtttcgctatcacccgctttaacctgaaaaccccgggacgcgatattgaaaccaatagtgccttcgaaaaggccgtcaccggcgtgaccggaaaatcaggctacaacgtcccggcgattctggcggcgctcggcggcgcggaaaatatcgtttcgctcgataactgcatcacccgcctgcgtctgtcggttaacgacatgagcaaagtcgacagcgccgcgctgaaagcgaatcgcgccatcggcgtggtgcagctcaatcagcacaacctgcaggtagtgattggcccgcaggtgcagtcggtgaaagatgaaatggctgtcctgatgaataccgtcgaggcataggctccgccccctccgaacaggagggggacatgatgaaggaagtgcagatgtttgatttttcaacgccggtcgaccgtcacggcacctggtgcacccagtgggattacgtcgccgaccgttttggcgcggccgacctgctgccctttacgatctccgacatggatttcgccaccgccccctgcattatcgatgccgtcagcaaacgcctggcgcacggcgtttttggctacagccgctggaaaaacgatgaattcctcggcgcggtgagccactggttcgccagccgttttcatagcccaatcgaccgcgaagcaattgtttacgggccgtcggttatctatatggtggcggagatgattcgtcagtggtcggcagcgggtgacggtattgtggtacacactccggcctacgatgccttttataaaaccattgaaggcaaccagcggcgcgtcgcggcggttccgctctccctcgacaaccatcagtggcgctgcgatatggcgcagctggaacgggtactggctcagccgcgtaataccgtgctgctgctgtgcagtccgcataaccccaccggcaaggtatggacccgcgaagagctggaaaccatggcgcggctgtgcgagaagcacggcgtaaaggtaattagcgacgagatccacatggacatggtgtgggacgaacatcagcacaccccgtggtgcgaggtggctcgcagcccctgggcgctgttcacctccggatcgaaaagtttcaacattccggcgtttactggcgcatacgggctgattgacgatcccgcggcgcgcgaaagctatctgcacgcgcttaaggcccgcgatggcctctcttccccttccgtaccggcgctggtggcgcatatcgccgcctatcgcgagggcgccgcctggctggatgccctgcgcggctatctgcaggagaatatgcgctacatcgcgcgcgaactgaatcaggcgtttcccgagctaaactggcagccgccgcaggcgacttacctggcgtggattgacctgcgcccgctggcggtggacgatcgcgccctgcaaaaagcacttattgaggaacagaaggtcgccattatgccaggggacacctacggcgatgagggtaagggttttgtccgcctgaatgccggctgcccacgtgaaaagctggaaaaaggcgtgcagggattaattgccgccctgggctcgctgcgctgattgttttcgctggccgccaacgcggtagcggcctgtctgctaccgctgactctccgctcactcatccgtcctcccggcacaataaaacgatattttgacgagactcaaaaaacgctatttcacaaaggtgtatttaaatgccgtttttaattcccgtcaaaatattcaccaggaggaaaaaatatgaacacctacgatcgtaaccgtaacgctatcgctaccggcagcatggttatggtggccgacagcggcgcgacgggcgtcatcaaagccatccacgccgagggtaaaacggcggagcagctccgccgggcggactgcgtggaaatagacggacatcaggggttatattgcccgctaaaccttattcgcctgggctttaattaatcgcaatatccgtcatctaataactgaccgcggatccgcaggcgtaaaaggccacccaggcgtggcctttgatattctctttatcgttcaatttgatcccatcgagcgttttacgttaataagcagcgtattatcgcccctcttctacccgctacgggtaatataccttctgagttcagaggcatctacatgacatggcaacagttcaaacaggcgtggctgattaaattctggtcccccgtccccgccgttatcgccgcgggtattctctcaacctactacttcggcattaccggcaccttctgggccgtcaccggcgaattcacccgctggggtgggcaattgctgcagctcgtcggcgtgcacagcgaagagtggggctactataagctcattcatctcgagggcaccccgctcacccgtatcgacggcatgatgatcatcggcatgtttggcggctgtttcgccgccgcgctgtgggcgaataacgtcaagctgcgcttcccccgcagccggatccgcattctgcaggccgtcgccgggggaatcatcgccggtttcggcgcccgtctggcgatgggctgcaatctggccgcattttttaccggtatcccacagttttccctgcacgcctggttctttgccatcgctaccgctatcggaacctggttcggcgcgcgctttaccttactgcccatcttccgtattccggtaaaaatgcagaaagtgtcccaggcctcgccgctgacgcaaaaacctgaccaggcgcggcgccggttccgtctcggcatggtggtctttttcgccatgatcgcctggggcctgctcaccgcggccgatcggccgaagctcggcctggcgctgctatttggcgtcggatttggcctgctcattgagcgggcgcagatctgcttcacctccgcctttcgcgatatgtggatcaccgggcgtaccaatatggcgaaggcgattattttcggcatggccgccagcgctattgggatcttcagctacgtgcagctgggtatggagccgaaaatcatgtgggcggggcccaacgcggttatcggcggcctgctgtttggctttggcatcgtcctggcgggcggctgcgaaaccggctggatgtaccgcgcggtggaaggtcaggtgcactactggtgggtcgggctgggcaacgttatcggttcaacgatcctcgcctactactgggacgggctttctccggcgctggccacaagctgggataaaatcaacctgctggcgaccttcgggccattcggcggcctgctggtgacctatctcctgctgctgatcgcgctgattctggtgattggctgggaaaaacggtttttccgccgccagtctctcgccccctcgaccgttaaggaaaccgcatgaaaactctggtccccgattatcgcctcgatatggttggcgaaccctgcccctatccggccatcgccacgctcgaagccatgccttcgctgaagaaaggcgagattctggaagtggtcagcgactgtccgcagtcgattaacaacatcccgctggatgccaaaaaccacggctataccgtgctcgacattcagcaggatgggccaaccatccgctatttgattcaaaaatagccagaaaaaagccggtagtgggctaccggctgtcttccgcatcacatgcgccagcccgcgcgtcacgggcctgaaaacgtcaacgattaccagcccttaaccgcatcgcctttgtaaagctgctctgctgccgcggccacctcatcgctctggtaggccttcaccaggtttttcaccttttcgctgtctttattttcgatacgactggcgaagatattcacgtaaggggaatctttgctttccacaaacaggccgttgcgcgacggcgacagcccgacctggcttgagaaggtggtattgataatcgccatggttatctgctggtcgtccagcgcgcgggtgagctgcggcgcttcaatttcgacgatttttagctttttcgggttgttaataatatccagcgaggtgggcagcagacccacgccgtccttcagcgtaatcagcccctgcttttgtagcagcagcagagagcggccgaggttagttggatcgttggggaccgccacctgcgcgccatcgggcagctgagcaaccgacgtgattttcttcgaataggccgctatcggataaacgaacgtggtgccaacctgaaccagcttatagccgcgctcctggatctgtttgtccagatagggcttatgctggaaagcgttagcatcaagatcgccattgttcagcgcctcgttgggcaggacgaaatcattaaacgtcaccacctcaacgtcgagattgtacttctctttcgccactttttgcgccaccgcccagacttcctggtcaacgcctgcgcttatgcccactttgatgtggttggggtcctgctcgccaggtttgcaggcggccagcagcagcgagcctgcgacaaccagcggtaccgcgactttttttaacgtgaagatcatattcccagagtcctttttaaaattgcctgccattcattgcaggaaaaccagcgcctgagactatagaaaatctcgggcgcgaaattaaatactgattgtctatgattaatagcgttttgctatgagcgatttcgtcattgctccctttgagagggcaatcttcccttccctcaccgtttttccttgtattgttcggtaattttctccgcttttaaccatttatcgttctgatgtacaatgacgcgcactttaactaaaaaaagagtgcgaccatgattgatttaactttgccattaaccgacatccatcgccaccttgatggtaatatccgggcccaaaccattctcgatcttggccgccagtacaacctcgcccttccggcagacaccctcgacaccttacgtcctcatgtacaggtcacccgcaatgagcctgacctggtcagcttcctcgctaaacttgactggggcgtaaaggtgctggcctcgctggaagcctgccgccgcgtcgcttatgaaaacctcgaagatgccgctcgcaacggcctgcactacgttgaactgcgtttctctccgcgctatatggcgatgacccaccagctgccggtcgcgggcgtggtcgaagcggtgatcgccggcgttaaagaaggcagccgcgactttaacgttgaggcccgcctgatcggcattctgagccgcacctttggcgaagcggcctgcgaagaggagcttgcggccctgctcgcccatcgcgatggcatcaccgccctcgacctcgccggggatgagctcggcttcccgggaaatctgtttatggatcacttcagccgcgcgcgcgatgcgggctggcgcatcaccgtacatgcgggcgaagccgctggcccggaaagcatctggcaggcgattcgcgaactgggcgccgagcgtatcggccacggcgtgaaggcggtgcaggatccggcgctgatggattatctcgccgcgcagcgaatcgggattgagtcctgcctgacctctaatattcagaccagcaccgtgccatccctggccgagcatccgctgaaaacattccttgaacacggcgtgctggcctgcatcaataccgacgaccccgccgttcagggcgtcgatattatccatgaatacaccgtcgccgccccggcagccggtttaagccgcgagcaaattcgccaggcgcagagaaacggtctggagctcgcctttttaagcgcccaggagaaagcggcgctgatccagcgcgtgcagcaggcttgatgtttctcccccgtgccagcacggggggaagctcaatcagcgcctggccagcgcgtttcgtcaggtcggcctaattcaggcacagcgtcgcccgatgcctggccgactccagcccaagctcaatcagctccataatctgaatcgcctggcttgccggaaccgggttaacgccgatgccattaagcgcatcgcgaatggcggcgtaatacgctggatagttgcccggtagcgtcagccacgactcctcggtgatttcctcgccttcggcacgcgtcagcagcccgtcgcgcatatcatacccccaatcctcctgcggcaggcgctcaccgcttttcagccgttcttcctgcggatcaaggccgtatttcacatagcttccccgcgaaccgtggatgataaagcgcgccgtttccgccgcggccaccagggttccgtgcagcaccacgcgacgctgcggccaggccaacaccgcatgaaaatagtctgtggactgggagccaggccgtagctgagccaggtcgacctgcatactcaccggcagaccgaagagatttaccacctggtccagcagatgcggggcaagatcgtaccagatgccgctgcccggcccaccttgctcgcgccagcgttgccgtacctgcggtcgatagcggtcgaaatgcgactcaaaatagccgacttcccctaacaggccttcgttaatcagcgacttcaccgtcagaaaatcgctgtcccagcggcggttatggaacacggacagcagtcgcccctcgcttttggcaatggcctcaagctcgcgagcctgtgacagtgtcacggtaaacggtttatccaccactacatgcttgcccgcttccagcgcagctttcgccagcgggaaatgggtatcattggacgtggggatcaccaccagatcgatatcggggtcgctaaagagcgcctgcggtgcggtcaccaccttcaccgcaggccagtcggccagcactttcgtttcatcgctgctcgagaccgccgccagcgtcatccccggcgtaccgctgaccagcggcgcatgaaaggttttgctcgcatagccgtacccgattaaacctacccggatagggtcactcatttttctgcccccttaacgaaatgtcgcagccgcactaacaccgcgattctgaacgcatcttcgacgcgtttgcccctgcaccggttgctcagctttacgccatttgcgcagctaagatcatgtaacacttgcgttacttcagtcgttgagtaccatttcagtctggtttcaccatttgccgtagagttatggaaaacgtttttaaccgtattgtagaacttattggctggattgttttgggcgtttcggccctgcttttagttatcgctcatcatattgataactaccagtccccgcctgccgttgatgctgttcagacgaagccgctgtcgaaataaacagtgacccgcttcgcaactatgcaaccggtttctgaaaccggttgcatagttgcatacgcctttattacactctctttatcaatcgataaggagtttcttcatgtccaaattcccgcaacactttttatggggcgccgcgaccgcggcctggcaggttgaaggcggtcacgatgccgacggcaaaggcccttctatctgggatatttattctcaccttccgggcaccacctatcaggggacgaccggtgacgtcgccgttgaccactaccatcgttttcgcgaagacgtagcgctgatggcggaaatgggtttgcaaagctatcgcttttctatttcctggccccgcctgctgcctggcggccgcggtgaagtgaacgaggctggcgtccaattttacagcgacctgattgacgaactgctggcgcataacattgaaccgatgattaccctgtaccactgggatcttccccaggcgctgcaggatgaaggcggctgggaggcgcgcagtaccgcggaagccttcgctgagtacgctcgcctgtgctatcaacgttttggctcccgggtcaaactgtgggcaacctttaacgagactatcgtctttatcggccacggttacattaacggcctccatcctcctgcggtgcgcgatccggcgcgcgccattcaggcctgccaccacgtctttatcgcccatgcgctggccgtgaaagcgtttcgtgaaatgggcgtggcgggggagatagggtttgtcaacgtgctgcagccgcacaccgcattaaccgacagtgaggaagataaacgggcgacagagatggcggacgccatccatacccactggctctacgatccggtattaaaaggcggctatcccgcagagctactgcagcagacccgggcgctgtggggggttccggtctttgaaccgggagacgacgcgctgctgcgtgacaaccgctgtgactttatcggcctgaactactatcgccgtgaaaccgtgtcggcgcagcctcctgaagtaccaaccggcggcgagccgggcgtggatgggctcttctacttcgtgcgcaacccgcaaagcacctataccgaatggggctgggaaatttggcctcagggcttaaccgacgggatcatgatgattaaagcgcgctacggtgatattccgatctacatcaccgaaaacggcctgggggcaatagacccgattatcaatggcgaaatcgtcgacgacccgcggattgactatctcagtagccatattaccgcgctggaaaaagcgctggaacagggcgccgacgtgcgcggctactacccctggtcctttattgatcttttgagctggctgaacggttataaaaaacaatacggattcgtttatgtcgatcaccagcaaaatctggcgcgtaaacggaaaaagagttttttctggtatcaaaacgttattgccagccgaggcgaacagcgttaatcttctctcccaggcgccttccggcgcctgattcagttatggaatactcttaaatttctttttaccaggccggaaacatcatctgttcttgtcaccggtatttacaaccgaaataattgcatacagtttatcttagaaaggaactgccggttgagaacaggtttactcagtatgggtatattcaacttaatttattccgattataaaatggatacgcaaatgaccgttcaggactacttattaaaatttcgtaaaatcagttcgctggaaagtctggaaaaactttttgatcaccttaactattccctgaccgataacgaagagatcgtcaacatgtatcgcgcggccgaccatcgccgggcggagctggtttctggcggcaaattgttcaacatcggcgaagtgcccaagtccgtctggcgctacgtgcaataaagactgtcatcattcacgccagttgcttatacttccgccctgcttttatttataactggcgttgaattctggagtaataatgtcttctgactctgtggaacgtattggcggatggcttctggcaccgctggcatggctcctggtagccttgcttagcgcctcattgtcgctgctgttttttgctgatgctctgatgtcttcccagacttacgcattgctgagcgcgatgagcatcgaacatctcgccctgtggatcgcctccttagcctttgcgatcgccatgtggtactacacgctgtggttgaccatcgccttctttaaacggcggaaaggggtaccgaagcactacattatctggctgctgatcacgcttctgctggcggtaaaagcctttgccttttccccgatttccgacgcgctcgcgctgcgccagctgctcttccctctcctcgccgcagcgctgcttgcgccctatttcaggcgctctcaacgggttaagcggacctttgtgaatccgtaataaccacacagttaacctgttgtcgccggtatcgatttattcgataatagacggctttttctatttcaggtcgaatgatggctgattatttactgctctttgttggcactgttctggttaacaacttcgtgctggtgaagtttcttggactgtgcccgtttatgggggtttccaaaaagctggaagccgctatggggatggggctcgccaccacgtttgtgatgacgctggcctctatttgcgcctggttaattgatacctggatccttatcccgctggatctggtctatttacgtacgctggcctttatcctggtcatcgccgtggtggtgcagtttaccgaaatggtcgtgcgtaaaaccagcccggcgctgtatcgcctgcttggcatcttcctgccgctgatcaccaccaactgcgcggtgctcggcgtggcgctgctcaacattaaccttgggcataatttcctgcaatcggcgctgtacggttttgccgccgcggtcggtttttcgctggttatggtgcttttcgcctccattcgcgagcgactggtggtagcggatgttcccgcgccgtttcgcggtaacgcgattgcgctggtcaccgcaggtttaatgtcccttgcttttatgggctttagtggtttggtgaagttgtaatgaacgctgtctggatagccgtggtcgccattagcctgctggggctaattttcggcttaattctggggtacgcctcccgccgctttgcggtggaagatgacccggtggtggaaaaaattgatgccctgcttccgcagagccagtgcggccagtgcggctatcctggctgtcgtccctacgctgaagcggtggggacccagggcgagaaaatcaactgctgcgcccccggcggcgaagcggtgatgctgaaaatcgccgagctattgaacgtcgatccgcagccgacagacggcgatgcgcaggaagccgaaccggtgcgaatgctggcggtgatcgacgaggcgaactgcatcggctgcacaaaatgcattcaggcctgtcccgtcgatgccatcgtcggcgccacgcgcgccatgcatacggtgatgagcgatctctgtaccggctgtaatctttgcgtcgcgccttgtccgacgcaatgtattgaactgcgcccggtggcgccgacgacagaaacctggaaatgggatcttcagaccatcccggtacgcattattcccgtggaacaacatgtttaagttattttccgcttttcgcaaagataaagtctgggacttcaacggcggcatccatccgccagaaatgaaaacccagtccaacggtaccccgctgcgtcaggtttcactgccgcagcgttttgtcattccgctaaaacagcatattggcgcggaaggtgaactctgcgttcagccgggcgatcgcgtcctgcgcggccagccgttaacgcgcggctggggcagaatgctgccggtgcacgccccgacgtccggtacggtggcggccattgccccccactctaccgcccacccttccgcgctggcggaaatgagcgtcattattgatgccgatggcgaagaccgctggattgaacgcgatggctggaacgattaccagaataaatcccgcgaagcgctgattgagcgtattcaccagtttggcgtggccggactgggcggcgcgggtttcccgaccggcaccaagctgcgcggcggcggcgacaaaatcgacacactcattatcaacgccgccgagtgcgaaccctatattaccgccgacgaccgtctgatgcaggattgcgcggcgcagatcgtcgagggtattcgcatccttgcccatattctgcagccagctcaggtactgatcggcatcgaggataataaaccgcaggcgatttcgatgctgcgcgcggtattagccgacacgcacggtatttccctgcgcgtgatccccacgaaatatccctccggcggcgcgaaacagctgacgcagatccttaccggcaagcaggtgcctcacggcggacgctcctctgacatcggcgtgctgatgcagaacgtcggcaccgcctatgcggtgaaacgcgcggtaatcgacggcgagccgctgaccgagcgcgtcgtcaccctgaccggggaagcgatctcgcgtccgggcaacgtctgggcgcgcctcggcactccggtcagccatctgctcaacgatgccggtttctgtccgagcggcgatcctatggtaattatgggcgggccgctgatgggcttcaccgtgccgtggctcgacgtgccggtcgtgaaaatcaccaactgcctgctggcgccgtcggcgagcgaaatgggcgagccggaagaggaaaaaggctgcatccgctgcagcgcctgcgcggacgcctgcccggccgatcttctgccgcagcagctttattggttcagcaaaggccagcagcacgacaaagccaccagccataacctggcggattgcattgagtgcggcgcctgcgcctgggtctgcccaagcaatatcccgctggtgcagtacttccgccaggaaaaagcggagatttacgcgcttgctcaggaagagaaacgcgcggcggaggcgaaattacgctttgaggcccgtcaggcgcgtcttgagcgcgataaagccgcgcgtctggaacggcataagcaggccgcggtccagcccgcggcgaaagatcaggacgcgattaacgccgcccttgcccgggtacgggaaaagcagcgtgacgcggcgcagccaattatcgtgctctccggcgccaaaccggataacagcgaagccattgccgcccgcgaagcccgcaaggccgaggcccgggcacgcaaagcgcagcaacaggcacaaagcaacgtcgccgggccgtcatccgacgccgccgttgacccgcgcaaggccgccgtcgaggccgccatcgcccgagccaaagcgcgcaaagtcgaacagcaggcggttcctgcggaagacgccgcagcggagcagcccgccgccgttgacccgcgcaaggccgccgtcgaggccgccatcgcccgggctaaagcgcgtaaagcagaacaacagcaacaagcagttcccccgtcggcagccaatgatgacgcccgcaaagcggcagtcgctgaagcaatcgcccgcgttcaggcccggaaagcatcccggcaggcagttaacgaggattaaatggttttcagaatcgcaagttccccttatacccacaatcagcgccagacttcgcggattatgctgctggtgctgctcgccgccgtgcccggcatcgcggttcagacctggtttttcggctggggtaccgtgctgcaaattatccttgccgccatcacggcgtggggagccgaagcggccatccttaaactgcgcaaacaaaatattcccgcgatcctcgccgataactccgcgctgctgaccggcctgctgctggccatcagtattccgccttttgctccctggtggatggtggtgctggggaccgcgttcgcggtgatcatcgctaaacagctctacggtggtctgggtcataatccttttaacccggcgatgatcggctatgtcgtactgctcatctccttcccggtccagatgacttcgtggctcccgccgcatgagatagccgccaatgttcccggatttagcgacgcgctgcggatgattttcactggccatacggcgagcggtggagacatgaacagcctgcgaatgggcattgacggtatcagccaggccacgccgctggataccttcaaaacctcgcttcatgccggtcacgcggttgaagagattctccagtatcctgtctacggcggcgcgctcgccggcctcggctggcagtgggttaacgtggcgtatctggcgggtggtctgttcctgttatggcaaaaagccattcgctggcatattccggtcagttttctgctgagccttgccgtttgcgctaccctcggatggctgttctccccggaaagcctcgcctcgccgcaaattcatctgctgtccggcgccaccatgctgggcgcattctttattctgacggatccggtaaccgcctccaccaccaatcgcggacgcctgatcttcggcgcgctggcggggttactggtatggctaattcgcagctttggcggctatccggatggcgtggcctttgccgttctgctggccaatattaccgttcccttgatcgattactatacgcgcccgcgcgcgtacggccaccgctgaggacccgaacatgttacaaagcatgcgtaaacacggcatcacgctggccctctttgcggcggggtctaccgggctgacggccgcgattaacgagctgaccaaaagcaccattgaagaccaggctgcccagcagcaaaaagccttatttgaccaggttatgccggctaatctttataacaacgacttgctgaaaagctgttatcaagttaccgccccggcgctgggaaaaggccagcacaaggtttggatcgctcaggatggcgaaaaaccggtggctgcggtgatggaagccaccgctccggacggctattccggggccattcagctgctggtggccgccgattttaaaggtaccgtgctgggtacccgcgtcaccgaacatcatgagacgccggggctgggcgataaaatcgaactcagaatttccgactggatcaccctctttgccggtaaagtgattcatggacaaaacgacagccactgggccgtgaaaaaagacggcggcgacttcgaccagtttaccggggctaccattaccccgcgcgcggtggtcaatgccgtcaagcgcgccggcctgtacgcacaaacgctgcccgcgcagatttccgcattcactccctgtggagactaaatcatgagcgaagtaaaagacgttattgttcaggggttgtggaaaaacaactccgcgctggttcagctgctggggatgtgtcccctactcgccgtgacctcgaccgccaccaacgcccttggccttgggctggcgacgacgctggtgctcaccctgacgaacctgaccatttccagcctgcgccgctggacgccggcggaaatccgtattccgatttacgtcatgatcatcgcttcggtggtgagcgtcgtgcagatgctgatcaacgcctacgcgttcggcctctatcagtctctggggatctttatcccgctgattgtcaccaactgtatcgtggttgggcgcgctgaggcctttgccgcgaaaaaaggcccggcgctgtcggcgctggatggtttttccatcggtatgggggcaacctgcgcgatgtttgtgctcggctcaatgcgggaaattctcggcaacggtaccctgtttgacggtgccgatagcctgctcggcagctgggctaaagttctgcgcattgaagtatttcataccgatacgccgtttctgctggcgatgctgccgccgggggcatttattggcctcggcatgatgttggcggtaaaataccttatcgatgaacgtagcaaacagcgcaaagctaaagcggtacaagccgatgtcgttgcgccgtctgatgtgacgggaaaagcctggaatgaataagagtaaacgcctggagatcctcaccaggctcagggataacaacccgcaccccaccacggagctgaattttcactcgccgtttgaattattgattgccgtcctgctctcggcgcaggccaccgacgtcagcgtcaacaaagcgacggcaaaactctacccggtcgccaacacaccggcggccatgctggcactgggcgttgagggcgtgaagtcgtatatcaagactattggcctgtttaacagcaaagcagaaaacgtcatcaagacctgtcgtatcctgcttgagcagcacaatggtgaagtgccggaagatcgggcggcccttgaggcgcttcccggcgtcggccgtaaaaccgcgaacgtggtactcaacaccgccttcggctggccgacaatcgccgtcgatacgcatatcttccgcgtttgcaatcggacacaattcgcgcccggtaagaacgttgaacaggttgaagaaaagctgttaaaggtggttccagcggaatttaaagtcgactgccatcactggttaatcctgcacggccgttatacctgtattgcccgcaaaccgcgctgcggctcctgcctgatagaagacctttgcgagtacaaagagaaggtcgatctctgaacacgcatcgcgtcattatccatcagggtgatgacgctgcttttcccccgccttcatcgacattcacgccatcattttcgcgctgttgcgggtgattatgcggttatataatcatcggccagcttattcattttttttagaggcaaaatttctatacatttgtgatcgagatcacctggtcaatttattgttgatttaatgttaacgcttttgcgtgcaaacctgctgattcaaatacccttaagttaaataccaacacaataacccatcaatttttaggattacgggctatatcactggatgcaagcgcatacagccgaacatatcgccattatgcgaaaaacttcggattccagaagataaaaactccccctttggctaaaccttgaaatttaactctgaataacatttgagtaggcggtgtattatgccgcatggaatatgtgtaacagattattgcaaagctattgcctgaaggggcaggatagtgaacattacctgccgttttccctccagaataactataaaggcggcggtctgagaagattgcgccccgaacaccccccgttaatatgggatgtaaaaaaagaggtatttgtgtcgactgcaaacaataaaccaacagaaagcgtaagtttaaacgctttcaaacaaccacgttcgttctatctcatcttctctattgagctgtgggaacgttttggtttctacggcctgcaagggatcatggccgtttacctggttaaacagctgggtatgtcagaagcggactctattactctgttctcctcctttagcgcgctggtctacggcctggtggcgattggcggctggctgggcgacaaggtgcttggcactaagcgcgtcatcatgctcggcgcaatcgttctggctatcggctacggcctggtagcgtggtccgggcacgatgcgagcatcgtgtatatgggtatggcgacgattgccgtcggtaacggcctgtttaaggctaacccctcttccctgctctcaacctgctatgaaaagaacgacccgcgtctggacggtgcatttaccatgtactatatgtccgtcaacatcggttccttcttctctatgctggccacgccgtggctggcggcgaagtttggctggagcgtcgctttcgccctgagctttgtcggcctggttatcaccatcgtcaatttcgctttctgccagcgctgggttaaacagtacggctcgaagcctgacttcgccccgctgcaggtaggtaagctgctggcgactatcgttggcgtggtggttctcatcgcgattgcaacttggctgctgcacaaccagggtattgcacgtatggcgctgggcgtggttgcgctgggcatcatcgttattttcgctaaagaagctttcgcgatgcagggcgcggcccgtcgtaaaatgatcgtcgctttcatcctgatgctgcaggcgattatcttcttcgttctgtatagccagatgccaacctccctcaacttctttgcgattcgcaacgttgaacactctctgctgggcatcgctttcgagcctgagcagtaccaggcgctgaaccctttctggatcattatcggtagcccgattctggccgccatttataacaagatgggcgataccctgccgatgccgatgaagtttgctattggtatggtcctgtgctccggcgccttccttgtcctgccgctgggcgctaagttcgccagcgacgcgggcatcgtaaacgtcagctggctggtgatcagctacggcctgcagagtatcggtgaactgatgatttccggtctgggtctggcaatggtggcacagctggttccgcagcgcctgatgggcttcattatgggtagctggttcctgactaccgctggcgccaacctgatcggcggctacgtggcgaacatgatggcggtgccggataacgtgactgacccgctgatgtcgctggaagtttacggtcgcgtgttcctgcatatcggtgtcgccaccggcattatcgccatcctgatgctcatgacggcgccgaagctgaaccgtatgacccaggacgacgataaaacggcaaaagccagcgataccgctacggcttaagctccccgggaaaacccataaatttaaaccgctaacgcgctgttagcggttttttttacccctgggcggactaacatacaggaaaccgcagccacgaggagttaccgatgaaactgttctacaaatccggcgcttgttctcttgcttcgcatatcgcgctacgcgaaagcgggctggacttcaccctgcagggcgttgacgtgatgaaaaaacgtctcgaaaacggggatgattatctgcagatcaacccgaagggtcaggtaccggcgctgctgctggacgatgatgtgctgctgacggaaggcgtggccattatgcaatatatcgccgatcgcgtgccggaccgccagctgctggcgccggtgggaagcattgcccgctatcagacgctggagtggcttaactacgtggcgacggagctgcataaaggttttaccccgctgtttcgcccggatacgccggaggattacaaacctgtcgctcgcgcgctgctggacaaaaaaatgcagtacgtgaacgaatgcctggaagataaagagtggattaacgggcaccgtttcactatcgccgatggctacctgtttaccgtgctgcgctgggcgtacgccgtgaagctggatatggaaggctatagcaatattgcagcctggatgaagcgcgttgccgcccggcctgcggtagccgccgcccttgaggctgaagggctgaagtgaagccgatgcttgcccgacgcaggtcgggcaagttgttctcacacctcttaaagctgcgtagcgctgaagtagtgctccggctgcgcgatgcgatcctgagccgccacaacctgtagttcatactcctgcatattttttgtcgccagcatgatttcatacaccgcggcggtcacgtgctccagcgcatcgcgcagtcccgcgccctgcagcagcttaaccagcagcagcccgctggtgacatcgccgacgcccaccggctggcgcatgccaaaatccaccagcggacggctgatatgccaggcttcctgcgcggtgaccagcagcatttcaaaacgatccatactcagcccggcccgcgaaagatgcttcaccagcaccacttccggcccctgtgcaatcagctcgcgcgcggccagcaccgcttcgttgacgttcgccaccggatgcccgcagaggatctccagctcaaccaggtttggcgcaataatatcgctcgccggcagcgcatagcgtacatgaaactccgcgacgccgggcgccacgatacagcccttttcagggtgccccatgaccggatcgcagaaatatttcgcggccggattggcgcttttcacctgacgcacgatgccaagaatatgttcgccctgttccgccgatcccaggtatccgcttaataccgcgtcacagcgctgaagctggttaatatcggcaatcccctgaacaatttccgtcagatgcgctggcggcatcacgcagccggtccacttcccgtattgggtatggttggagaattgtacggtattaagcggccagacgttggcgccaaggcggcgcatcggaaattcagcggcgctgttgcccgcatggccaaacacaacgtgggactggatggcgaggatattcttcatcttgattacctgagagcaaaaaataaggggcgcggtttcccacgcccctgcctttacgcaattacttccagcagaccagacagtaatttttcttaccgcgacgcagtaaggtgtagcgaccaaagagacggtcggcatcaacaaatacgtattccgggtcggactgtttttcgccgttgatggtcaccgcattggatgcgatggttttacgcgcctgaccgcgggacggctgcagttcagaatcaaccagcgcctgcatcagatcggcgcctttatccatttcgatcatcggcacgccatcctgcgccagctgttcgaaatcggcttcgctcaaatcgctcaggttaccgttgaacaggctctcggtaatgcgttttgccgccaccagaccttcttcaccgtgcaccaggcgggtcacctgttcggccagcacatactgggcgcgcggtgctttaccgctgtttttgtcttcttcttccagggcattgatgtcagccatgtccataaaagtgaagaacttcaggaagcgataaacgtcggcatccgcagtgttgatccagaactggtagaacttgtacggactggttttcttcggatccagccacactgcgccgccttcggttttaccgaatttcgtgccgtccgccttggtgatcagcggaacggtcaggccaaagacctggttctggtgcagacgacgggtcaggtcgataccggaggtaatgttgccccactggtcagaaccgccgatttgcagcgccacgccgtgcagcttgttcaggcaggcaaagtcgtaaccctgcagcaggttgtaggagaactcggtaaaagagatgccctggtcgtcgcggttcagacgctgcttcaccgcttctttgttgatcatctggtttaccgagaagtgcttgccgatatcacgcaggaatgtcagcacgttcatgctgccaaaccagtcgtagttgttggcggcaatggcagaattttcaccgcaatcaaagtcgaggaaaggcgcgacctgtttgcgaattttatctacccactcctgcacggtatcttcagtgttcagtttacgctccgcggctttaaagctcgggtcgccaatcagaccggtcgcgccgcccaccagggcaaccggtttatggccggccatctggaagcgtttcaggcataacaatggaacaagatgccccaaatgcaagctgtcagcggtgggatcgaagccgcaatagagcgcgatcgggccttgcgccagtcgctctgctaacgcttcttcgtccgtcacctgggctatcagcccccgctcctgcaattgtttaatcaagttactgcttgccatcaaattctccatctataaaacgactgcacctctgccggtacacgacttttcgccagacgcgaaaaaaatatctacgcaaaattattcaagctgcgtcgccgcggcaagcatgtgaaagcccggggaacttactcaggtaagcgacagagccaggcaggcgcagctaacaatgatgcagcttgaaaaatgaagcgtatagaataaagcgccgggccacgatgcaccagcgcttaacacaacatttttgcgtcctttatggcgccagtcggtcgatttgccagccgccgttttgccgctggtagagaaaacgatcgtgcagacgatgctcgccgccctgccagaactccatctgttcgatactgacgcggaatccgccccagaagctcggcagcggcacttcgccctgctggaatttttgcttaagctccaggaacttactctcaaggatgccgcgcgccgagatacggctggactgctgcgacacccatgcgccaatctgactatcgcgcggacggctatggaaatatttcaccacttccagcgttgaaaggcgttccgctttaccgataaccatcacctgacgttccagcatatgccatgggaaaagcaggctgatgcggggatttttttcaatctgatgggctttgcggctgccgaggttggtatagaacaccaggcctttctcatcgtagtgcttgagcaacacgatgcgctggtaaggctgcgagttttcatcgacggtcgcgacaaccatcgccgttgggtcagcgagctttgcgtcacaggcctgacgcagccagcgctcaaagagtgccagaggttcggcgggaagatcgtggcggcgcaggccaccacgggtatactcacggcgcaggtgcgcgatttgctgcaattcgtcgttatcagacatggcaattgagaaaataatcaaagggtagcgttattgtgcgcccccatggctgaaatctcaacgtttggcggtttgcagctgacagttttccagcacgatacggtcccgtttatagacggtggcgctatcgcccttcgaccagaagacgtaaacgccatcggtatagcgcgcgccagaggcggagagcccctgctgtaaattgagctgctgattatcgtaaataaagctgacctgctggcgagtatgattgagatggacggtcaacggtttctggtcacactgatactcgagggtgtccgtattcatccgctcgacaaactggttgtagtagctacagcccgccagcataaaaggtacagcaagaataagtatttttttcatcaatttgccttcgactttcccggtccgggaaggcataacgccctccctcaacgctgtccagtttacgaagaaaccggcgcgggtgatttcagttaactctgattttgcggcggattggccggaaaaatcgcgccaagcacggaagcttgcgacgcgccggtcacggaagggagattgccgggtagtccggcaagcgtccgccacgccagccatgcgaaagccagcgcctccatatcatcaccgctgatccccgcctcatcggtcgtcgatacctcggttcccggcagcagcgccgccagacgggccatcagaagcggattgcgcgccccgccgccgcataccagcaggcgttcacatcccccgctgagcagcacctgttcactgatgctgacggcggtcagctccgcaagggtcgcctgaacgtcctgggcgcgaagccccggataacgcgccagatgctgcgacagccagccgtagttaaagtattcacgaccggtgctctttggcgccggcagcgcaaaccacggatcgcttagcatatcctgcagcaacggcagcacaattttaccctcgctggcccactgcgcgtctttatcgaagggtttaccacactgacgccagacccacgcatccatcagcatgttgcccgggccggtgtcgtagccgcgcaccggcagacctggcgccagcaaagagaggttggcgatcccgccaatattgagaaccattcgacgctcaaccgggtgcgccagcagcgcgtggtggaacgccgggaccagcggcgcgccctgcccgccgagcgccatatcgcgacggcgaaagtccccgaccaccgtcacgccggtatgcgcggcaatctggttattgtcgccaatctgcaaagtatgcggcgcatcgcctgctggctcatgccagaccgtttggccatggcagccgatagcgatgatgtccgccgccttgagcttttcccgagccatcaatgccagaaccgcatcggcaaataaccgtcccaggcgcgtatcgagacgccccagctgcgaaagagtcagctgctgcccctggcagatggccaggatatcttctttaatcgcgattgggatgggataggtcaggctggcctgctgggcaaccagattttcattaattgctgcgagaacaacatcaacaccatcaaggctggtgccggacataacgccgataaagcggcctgatttcatacgctttccttcattccatgactctcgtatatccccacactccatcataaacgagggggcaaagctacgctgctataatactttttaacaatacaagcagcgctgccgattcttagggtaaagaacttgtgtttagtttaggttgagacgactctgattattattttttgtatagtcgttgcatctgctatgccagcagacgcttaaatgccatataattggctacaaggaagttcaacagaacgcttcttggtgaacaggagattcataaatgattttacgtgttttggctgtctcgatgattggttttacgcttgcaggctgcgtcagcagcagcggcctgtccggcgatgtttactccgcatctgaagccaaacaggtccagagcgtgacctacggcaccattgtgcatacccgcgcggtgcagattcagggcggagatgacagcaacgccatcggcgccatcggcggcgcggtgctcggcggcttcctcggtaacaccattggcggcggcacgggtcgctccctggcaacggcggcaggcgcagtcgccggcggcgtagccggtcagggcgtacagggcgcgatgaataaaactcagggcgttgagctggaaatccgcaaagatgacggtaacaccatcatggtagtgcaaaagcaaggcagcacgccgttctccgtcggccagcgcgtagccattgccggcagcggcagccaggtgacggtctccccgcgctaaatcttctctctgcggcccggacgggccgcttattgatataaaatacgtattatttcctcagtgtaaataaataattcatatatatttatatttttcttttatacatgcactaatttgcgcccgcgcaatattccgcccgccaccatcaagtattctccagccagtattatttaaaacattgcggcaattctgtcgttttaccttcgcatttttcaggggtgttgactatgcgcgttaatataaaaagcttaccctgccggatatttatttacgctatcgcgtgcagtctttctattgctgtggttaattttattaccacctcattaattcatcgtatctctacaacatcatccatgcttttccctgtgctaactatttcactgatgggttttcatattatgattgcctgctttatgggcatgaaatatctgtgtgataaaaaacagctgtacctggccccgatagccttcgcgtttacctgctcggccctgctgatgctgggaacgataggcagctatcccgactggctggtctgtgctcaggggcgcgagatcaatcaaaatgacgcgctgattttttattttttccgcaacgtgatgatggctgttttatttataacctcaattattttatatcgcatccgacatattaccggccactcaagaaaaattcacggtgcggtgctcagtagttgttttatttttatcagcgcaacgctcatattatcgtgggttcattcaagcaactcgccgttgctaagcattgaattcattgacaatctaacctatacctttacgccactatggcataatcgcattggctggctattaattatcatatggtcattaacgctgattttaatgatcggcctgactcggctgcgtaatatattctggtacagcggcgcctttttttgtaccgcctatatctttacgctgctggtgctgctctccacggttagcggtaacgctcactcctggaatcaggcgcggctttttgaaacgcttagcaccctgtttctgattttaattctgcttggtgacgtttttatactctatcgtgaatcaaacgaaagatacgtccgctcttaccagaactcgattcgcgatcccctgacccggctgtataaccgcagctatttctatgacaccctgactcagcgattgtcgaaggcttccgcttcacagccgctgtcggtcatcgtctgcgacctcgatcgctttaagcgcatcaacgacacctacggtcacgtgcagggagataaggtgattcagtttgctgccagcgtgttgcagaacaacgtgcgccaggacgacgctgccgcgcgtatcggcggggaagagtttgccctgctgctggtgaatatcggcgccaacgaagcgctggcaatcgccgaacgtatccgcctgtcggtcagcgagaagcaggagggattaccggagagaatgaccatcagtatgggcgtgttcaccactcaggatgcgcacgtttcggcagaagagtgcgttaagcgcgcggataccgcgatgtatgaagcgaaaaacagcgggcgtaaccgcgtagtggtctggcatgaatgaataaaaaagaggccttgagagtcctcaaggcctcgctaaggtcaatcttttgcctggagatcgagaatattgtgttcaagtttacgaatcaaattaagcagcgtttccacctcttccttagatacgccggccagaatctcatcacgcgtttttccgataacctcttccatttcgttgatcagaggctcggctttttcggtaagcttgatacgttttgcccgccgatcgttagcacaggtctggcgagaaataagccctttctcctccagctggtcgagcgtgcgaaccagcgacggctgctcaatacctatggctttcgccagctgaatctgcgactgttcaggcggcagctggtgaatgttatgcagcgtgacccagtgcgtctgcgttaactccagaggtttcaggcgatggtcgattagcgcgcgccagacgcgcaccaaacgtgccagatcagaaccaagtggcgattccaatttcatctccttataattagcttgctaagttattatactgattttagaatagtgtgcagcatttaaattaccaaaacaaatgaattacccgattcactaaaatcagaacaatgatttacaatgtgaataatcgcataacctgaacattcttcctgcaacggcaaaggatttttgcttgtgaaactgagtcttaacactgccggattgccgctccaggacctggtgttcggcgcttctgtctatttccctcccgtgtttaaagccgttttgctgggcttttttatctggttgattatccaccgccagctgcgggactggatgtatgcaggcgagatttggcatcccctgctaatggacctctccttctttgcgctctccgtctgtctggcgctggttttactgactatctggtaatgttcattacatgaagaaactaaaatacttatccacgctgctggtcgccgcgctggctattattgccgcctggctggtctggaattactacacgcaatcaccgtggacccgcgacggcaaggtccgcgccgagcaggttggcgtcacaccccaggtttccggaagcatcctgcagctcaacgtgcgcgacaaccagctggttaaagcgggagacgtgctgttcagaatcgatgacacgccttataaaatcgccctgctcaacgcccgggcgcagcttgctaaagccaaagcggaagtcgcccgcgcgcaggcagaacagaaaaaagccgccagcgatgccagccgtcggcgtcatctatcacagaactttatctcggcagaagatttagaaaacgccaataccgcgctgaataccgccacgaccaacctcgaagccgctaaggccgtggttggcgtggcgcaggccaccctcgatcacgcccaatggcagctcacgcagacggaaataaaagcgccggtcgacggttgggtcaccaatctctcaacccgggttggcgactacgccgccgttggccacccggttttcgccctcgtggatagccgctccttctacgtggtgggttattttgaagaaacgaaactgcgcaatatccgtcccggcgacagcgcgcagatcattctttatagcagcaagcagaagttacagggtcacgtaagcagcatcggacgcgccatcgtcgaccagagcgtggagagcggcggcgatctggtggcgaacattaaaccgaatattccgtgggtccgacttgcccagcgcgtaccggtgcgtattgagtttgatcatttgccgccggataccatcctggtctccggtaccacctgcaccgtagccatcggcgcgcaataatgaagctgcaggctctgacgtggcgctcgctcccgtggattaaggccagccgtccgcagtggcgctatgccttgcgtaacgggattgccatgtgcctggcgctgagcgtcgcctactggctgaatcttgacgaaccctactgggcgatgacctccgccgcggtggtcagctttcccaccgtcggcggggtgattagcaaaagcttcgggcgtattgccggcagcctgctcggcgcctgcgcggcgctgctgctggccgggcatacgctcaacgatccgtggctgtttctgttcagcatttcggcgtggatagccctctgcacgtgggcctgcgcgatgtttaccaataacgtcgcctacgctttccagcttgcgggctacacctgcgcgattatcgctttcccggttatcaatatcaccgacgcgaacgaactgtggaccatcgcccagtcgcgcgtctgcgaagtcatcgtcggtattttgtgcggcgggctgatgatgatgatcttaccgagcacctccgatggcgctacgctgctgacggcgctgaaaaacatgcatgcgcgcctgctggaacatgccagcctgctgtgggtgccggaaacgaccgatgccattcgcaccgcgcacgagagcgtgatcgggcaaatcctgaccatgaatctgctgcgcattcaggccttctggagccactatcgctttcgtcggcaaaatccgctgctgaactacctgctgcatcaacagctgcgaatgaccagcgtgatttcgagcctgcggcgaatgctgctcaactggcccaccgcgcccgcccgcacccgcgagatactggagtcgttgctcaacgcgttatctcatgccaacgccgacgccctgagcgttgcccgcatcattgctccgctggcgccccctgcggacgctgactaccggcatatcgccttctggaagcgtctgcgctacttctgtcgtctctatctggtgagcagccgctggctcaggcgcatcgaaaacgccagcgcgataacggaatttaacgtaccttccgcgccagcgctggctcgccataccgatcaggccgaagccttatggaacggcgtacgcaccttttgcgcgctggtgatggtcggcgcctggggaattagcacccaatggcaggcctgcgccgcagccctgaccctggcggcgatctgctgcgtgctctattcggtctctccttcgccgtttaagtcactaacgctgctgatgcgtaccctgatcctgctttcactctttagctttgtggtgaagtttggcctgatggtgcagataaccgatttatggcagttcttgctgtttctgtttcccctgctgaccaccatgcagttgctgaaactccagatgcctaagctcgccggactgtgggggcagctgattgtatttatggggtcgtttatttcggtgaccaacccgccggtctacgactacgcatcgtttcttaacgataatctgggtaaaatcatcggcgtcggccttgcctggctggcgttcgccatcatcagcccgggttcagacgcgcgtaaaagccgccgtcatatccgtgcgttacggcgtcactttgtcgaccagctaagccgccgcccgcagcatagcgagcatgaatttgaatcgctggtttatcaccacatcagccagctcagcaatagccaggatgcgctggcgcgccgctggctgctgcgctggggcgtggttttgctcaactgttcccacgtggtgtggcagcttcgcgagtgggaaacccgttccgacccgctatcgcaggtgcgcgatttatgcatcagcctgctgcgggatgtgatgagcgagcgcggggtacagcagcggccgctcgcctcgacgctgcaggagctgcagcgcatctgcgacgcgcttaatcaccaccaccagccggcagccaaagagctggcggcggttatctggcgactgtggtgcgcgctgtcgcagctggaacaggcgcccattgccggcaccttaacggaaagaactacttaatcacgccgcaggcgaaccgctcgccgccgccgccaaggggctgcgggctatcggacatattgtcgccccccacgtgaatcatcagcgccttccctttaacctcatccagcgtttttaagcgcggcgcgaccaccggctgggttgctttaccgtcgttattgaccaccaggaacggcagatcgccgaggtgaccggcgccgtcgggaccttcatgcttaccggttttttgcggatcgtagtgcccgcctgccgcgccagcggcgacggctttaccctctttaatcgcgggctggcagctgccgttggcatggatatggaagccgtgctcgccgggaggcagcgccttcaggtctggcgtaaattccaggcctttcgcggtttcgctgattttaacgctaccgatagcctgaccgacgctctggctggtgacaagattgatatcgacgctttcactggccgcctgcgcgcctgcgcacgcggccagggtaagtatggcgagaatacatcgttgcataacacctccttaatggctctgtcgctactaagtgtaggccattgcggaggtgatggggtttacggaacgtcgtaacctaacgccgctttgcggatacggaaccactgctggcgggacatcttcagcttttcggccgccaccgcggaacgcacgcgctctattttccctgagccaataatcggcaacggctgcgacggcaggcgcaggatccaggcatacaccacctgctcaatgcactccgcattcagctcctgagcaacgcgcgccagctcatcgcgcagcggcaggaagctgtcgtcgttaaacaaacgaccgccgccgaggcaggaccatgccatcgggcgaatacgcagctgctgaagctgatccagcgtaccgtcaagcagcggcggctgatgaaccggagaaatttccacctggttggtcgccagggtaaacggcaggcgcgactgcagcagggtaaactgggcgggggtaaaattcgatacgccgaagtgacgaaccttgccgctatggtgaagggccaggaaggcttccgccacttcatccgcatccatcagcgggtccggacgatgaatcagcagcaggtcaatatggtcggtggcaaggttacgcagcgactgctccgcgctgagaacaatatggtcgcggtcggtaatatagtgaccgatggtgttttccgcccgcgctttcgtggcaatcccgcacttggtgacaatttccatcctgctgcgcagatgcggcgccagctttagcgcttcgccaaacgccgcctcgcagcgatagtcaccgtaaatatcggcatgatcgatggtggtaatgcccagatccaggtgttgctcaacaaagcccatcagcgcctgagcggacatattccagtccatcagacgccagtagcccatcacaaaacgagagaattccggcccctgcggagccatagcaatacgctgaaccataacagcttcctcaataaaaaagtgccctgagtatacgcaattttaggcttaaaacagtgagggttgctgcggttcttccgcactatcctgcttagctgcgcgtaatttgcgcagtagccgctgtcggcacagacgcaaaacatcctgcttttgcgcatcgctcattttctgccagttgaaacgctcgtcgcggctacgcatacacccccgacagtagccgcgctcatcagactgacaaatcccccggcacggactctgtaccgggaagaattccagttgttcagccacttcgcctctcctgccgcttatctctttctttattgaagacgtttcatccgccgtacgcaaattttgttcatcagcctctgcgccaggcggcattttttaattatgacttgcattagaccaatcggtctattacagtgagcgccatgaacaagcacagtgaatgtaacacccgcgaacatatcctggccaccggcgagcagctctgcatgcatcgggggtttaccggtatgggtctgagcgaactgctgaaaacagcggaggtgccgaaaggctctttctatcactactttcgctctaaagaagcctttggcgttgcgctgctcgaccatcactacgccggatatcttcagcgcctggtcgatcattttgaccacggcgaggggaactatcgcgatcgcctcctggcctactatcagcatacgctgacgcagttttgccagcagggcatcatcagcggctgtctgacggtgaagctgtcggcagaggtctgcgatctgtcggaagatatgcgcaccgcgatggataaaggcgccagccagatcatcgttctcctcggcgacgcgctggagaaaggccgtcaggagggcagccttgcgtttgacggagacgccttaacgctctcgcaggtgctttactccctgtggctgggggcgaatctgcaggctaaaattacgcgtagcgcaacgccgctggaaagcgcccttgcccacgccaaacgtattattgctgcgcctgccgtttaacaggcgtttttatttatcccgtttcaagacgaccggtctactcaggagtcattatgtcagaatcaaagttgtttaccccgttgaaagtgggtgcggtaaccgtaccgaatcgcgtgtttatggctccgctgacgcgtctgcgcagcattgaaccgggcgatattccaaccccgctgatgggcgaatactaccgccagcgcgccagctccggcctgattatttccgaagccacccagatctccgctcaggctaaaggctacgcgggcgcaccgggcctgcacagcccggagcagattgccgcatggaaaaaaatcaccgccggcgtacacgcggaaaacgggcgtattgccgttcagctgtggcacaccgggcgcatttcccacagcagcattcagccgggtggcgccgcgccggttgcgccatcggccattagcgcgggtacccgtacctcgctgcgtgatgaaaacggccacgctattcgcgtagacacctcgatgccgcgcgcgctcgaaaccgccgagatcccggggatcgttgatgatttccgccaggcggtaggcaacgcccgcgatgccggctttgaccttgtcgaactgcactccgcgcacggctacctgctgcaccagttcctttccccttcttccaaccatcgtactgaccagtacggcggcagcgtggaaaatcgcgctcgcctggtgctggaagtggttgatgcggcgagtaaagagtggagcgccgaccgtatcgggattcgcgtctcgcctatcggcagctttcagaacgtcgataatggcccgaatgaagaagccgacgcgctctatctcatcgaagcgctggccaaacgcggtattgcttacctgcatatgtccgagccggactgggctggcggccaaccgtacagcgatgaattccgtcagaaagtccgcgaccgcttcccgggcgctattatcggcgctggcgcctacacggtggaaaaggcaaacgatctgatcggtaaaggcctgatcgatgccgtggccttcggtcgcgactatattgccaacccggatctggtcgcgcgcctgcagaagaaggccgcgctgaatccgcagcgtccggaaagcttctacggcggcggcgcggaaggttataccgattaccctaccctgtaatccctccattgatagcggcgggttatcgccgctatactcaacgctctgatgtatcaaaacaaactgcataggggacattatgcgcttacttcacaccatgctgcgcgttggcgacctgcaacgttctattgagttttacaccaacgtgctgggcatgaaactgctgcgcaccagcgaaaacactgagtataaatattcgctggcattcgtgggttacggcgaagagagcgataccgccgtgattgagctgacctataactggggcgttgataagtacgatctcggcagcgcttatggccatatcgcgctcagcgttgaaaacgcggccgaagcctgcgagcgtatccgccagaacggcggcaacgtgacgcgtgaagccggcccggtcaaaggcggcaccaccgtcatcgccttcgtcgaagatccggatggctataaaattgaactgattgaagagaaagacgccggaaaaggcctcggcaactaatcggctgcgggcacccgcggtgcctgctgttttatccccttcctgctgcaagccgcggcaaaatttgccataatgcgcgctacttttttccagctaagagaatctgatgtccgagaacgttcaacttaatggtctgtgcgaccgttttcgcggtttttatcctgtggtaatcgatgttgaaaccgccggatttaatgccaaaaccgacgccctgctggagatcgccgctattacgttgaaaatggatgaggaaggctggctgatgccggacgaaacgctgcattttcatgttgagccttttgaaggcgccaacctgcagcccgaagcgctggcttttaacggtattaaccctaacgatcccgagcgcggcgcggtgagcgaatacgatgcgctgcacgcgatttttaaaatggtccgcaagggaatgaaagagagcgactgcagccgcgcgattatggtcgcgcacaacgccacgttcgatcacagctttaccatggcggcggcagagcgggctggcctgaaacgtaacccctttcatccgttcgtgaccttcgataccgcggctctgagcggcctggcgctgggtcaaacggtgctgtcgaaagcctgtattgccgcgggaatggcatttgatggtactcaagcacactcggcgctttacgatacccagcaaaccgcccagctgttctgcgaaatcgtcaaccgctggaagcgccttggcggctggccattacccgtggccgaagagtaagcgataaaaaaagcgacttcaccggaagtcgcttttttattggcagccgaattactctgctttcggttcgtcagtcttgtacttcgcggccgtttctttgatcagctgctgcagttcgccgcgctgatacatttcaatcacgatgtcacagccgccgaccagttcaccgtcaacccacagctgcgggaaggtcggccagttagcgtatttcggcagctctgcgcggatgtccggattttgcaggatatcgacgtaggcaaaacgttcgccacaggcggagagcgcctgaacggcctgagcggagaaaccgcagcttggcagcttcggcgaccctttcatgtacagcaggatcgggttttcagcgatttgacgttggattttttctaaagtcgtgctcattgtcgtgcttccttaaacttctttacggcagtaatttgtcattgtagcgccctgggcgcaggaccgataataacatttttttcacttgccacattttatcttctgtcggcataagttgccttaaaaatatcattttattgctatacgcggcaacgcattgcgcgtttttcatgcgcgggtaccgttgacggaagcatttttttgcaaatgttaaccaaacgagacgttagatacaaaagagtagtaactctccacgattttatgctttagaatcgatgcggtttgtcattcatcgtcaggcatctgtatatgtctgtaatttaatcaggggattgctcagtggcgcgtcttaacaaaatcgcgatttcgctctgtgcattacttttcacatctatttcacttacgccgctggcgcatgcttccgggcatacgcacgcttcggccacgccaaaagcgcatccggccaagggcacgaccgcagagcgtaagaaaaaagcagccagttctaaaagtaaaaccaccgccaaaacccccagcaagaaaacgtcgaccgccagccgcagcaaatcaaccgcgtcacgccagactgccagcgccacaaaaaaatgcgttctgcgcaaaggctataaaaaactgtgcgccagttcgacaaggtcgatagcggaaagcaagatggcaaccgcaagcgtgcagaaaaagtgcgtggtgcgtaaaggctataaaacccgctgcaaaccggttgccgacgagccgcagctgaccatcgccgacgcgcataaagctcgggtacaaaaggcgcaaagcaccgccatgtccaagctgatggatcagattggcaaaccctatcgctggggcggcacctctccgcgtaccgggtttgattgtagcggtctggtctattacgcctataaggacctggttaaaattcacattccgcgcaccgccaatgagatgtatcacctgcgcgacgcccgtcctgtggatcgcggtgagctgcaaagcggggatctcgtcttcttccgcacccgcgggcgcggcactgccgatcacgtcggggtttacgttggcaacggcaaatttatccagtctccgcgtaccggccgcgacattcagatcacctcattaagcgacgattactgggtacgccactacgtgggcgcacgtcgcgtcatgacgccgaaaaccattcgctaattgtgccttgtcgctgcggcgacagggtaactctctcttttgccacatcttttaatttgctactattattaccctgcgtaatacatggttattacgcaggcaaactataaaaaggagagtagcaatgtcgttcgaattacctgcattaccatatgcaaaagacgccctggcgccgcacatttccgcagaaaccctggaataccactacggtaaacaccaccaggcctacgtcaccaacctgaataacctgatcaaaggcaccccctttgaaggcaaaaccctggaagagatcgtgcgttcttccgatggcggcgtttttaacaacgccgctcaggtctggaaccacaccttctactggaactgcctcgcgccgaacgccggcggcgaaccgcaaggcgaactggcggcggctatcgctaagtccttcggcagcttcgctgatttcaaagccaaattcaccgacgcagcggcaaaaaacttcggcgcaggctggacctggctggtgaaaaacgccgacggtagcctggccattgtctccaccagcaacgccggtacgccgctgaccagcgacgcgactccgctgctgaccgtggatgtctgggaacacgcttattatatcgactaccgtaacgcccgtccgaactatctggagcacttctgggcgctggtaaactggaagtttgttgctgctaatctggctgcataaaagcaaaccgcagaagccttgcagcttctgcggttattgtatgacttcacgcaatattaacggttggcgaacgcctcttccggctgcgcccggccgctgaacagcaccagcagtagcgccacgcccgcgataatcgcccccatcaccgggacaaaggcatagcccaggccgccagagatgaccgcgccgcccgccgccgcgcccagcgcgtttccgaggttaaaagccccgatattgaccgatgatgacagccccggcgcttcgtgggcgacgcgcatcacgcgcatctgcaaaggcggcaccaccgcaaaggtcgccgcgccccagaccaccatactgattgccgcacccacctgcgattgcgccagcagcgggatcgccagcatgataaccatcagcagcagcagaaagcccttcagcgtcccgctaacggaacggtcggcaaacttaccgccaaggtagttacccagcgagaagccgacgccaatcagcaccagcatggcggtcacaaacagcggagaggcgtgggtgatggtatgcaaaacgggagaaatataggtataaagcgtgaacatcgcccctgcccccagtaccgtcgtcagcagcgccgacagcacctgcggacgcatcagcacggaaagctcctgcttgacgtcagggcgctcgccggcgctgcccttcggtagagaaaaccacagaccgataatcgcaatcacgcccagccccgccgtggcaagaaacgacatccgccagccgatggtttcgcccagccaggtcgccgcgggaacgccgccgatattggctatcgtcagccccataaacatcgtcgccacggcgctggcctgtttgtgttttggcacaacgctcgccgccaccaccgaacccaggccgaagaaggcgccgtggttaaggctggtaataatgcgcgacagcagcagcgtggtgtaatccggagcaatggaagagagtacgttaccgagggtaaaaattgccatcaggaagatcagcgcatttctgcgcgcgcggtgggagagcagcagagtcatcagcggcgcgccgaccatcacgccgatggcataggcgctaatcagcattcccgccgccggaatcgaaacgtccacgcctttagcgataaccggtaatagccccatcggggagaactcggttgtgccgataccaaaggcaccgatcgccagcgcgagcaggggaaaattgattttcatgcagggactccatcaggccgccttccgcgacggcatctcatcagaagtcaaaagcatgacatcaatcacagaaaaacaaaagtgaacgaaatggcaaaagatttttgcgaaaatgataataatggcggagagaaagggagagcggcctctcccttaatcgcataattagtgcagtactgcagtcaaacctgcggcaacaatcaaaccaagaacaataatcgttgtcgtcagcgaaaactttaaatttgtatccatcaatttttccccctgattatccccacatgaaaagtgagcttgctcatttttacacagaatagcgtaaaaatcttccgagatttagagtgatgcacatttttgctcttcccctttgccccaagatcggacaaaatcccacgctaatttgaaagcgtatcggccattgaccccttcctgtcgttctgtgtcgttttcccgacgtgatgccatgctcaattttggcgccagggtgtgtacaggcaaacgtttacgtaccgataaacagacgatcaggtcaaggtctggagtgagaagtaatggcaactattaaagatgtagcgaagcgcgcaaacgtttccactacaacagtgtcacatgtgattaacaaaacccgattcgttgcggaagagacgcgcaatgcggtgtgggcggcaataaaagaactgcattactcccccagcgccgttgcccgcagcctgaaggtcaatcacaccaaatctattggtctgctggcaaccagcagcgaagcggcctatttcgctgagattatcgaagccgtcgagaagagctgcttccagaagggctacaccctgatcctcggcaacgcgtggaacgacccggagaaacagcgcgcctatctgtcaatgatggcgcagaaacgcgtagacggcctgctggtgatgtgctccgagtatccggagtcggtgttaagcatgctggaagagtatcgccatattccgatggtagtgatggactggggcgaggcaaaagccgacttcaccgactcggttgtcgataacgcctttgaaggcggctatatcgccgggcgctaccttattgagcgcgggcatcgcgatatcggcgtgatccccggcccgctggagcgtaacaccggcgcaggccggctggcaggttttatgaaagcgatggaagaggcgcagattagcgttccggaaaactggattgtgcagggtgattttgagccggaatccggctaccgcgccatgcagcaaattctcggccagcaccctcgcccaacggccatcttctgcggcggggatattatggcgatgggcgccatctgcgcggcggatgaaatgggtctgcgcgtgccgcaggatatttcgctgatcggttatgataacgtgcgcaacgcccgctactttagcccggcgctgaccaccattcatcagcctaaagactctcttggcgaagcggcgtttaacatgctgctggaccgcatcgttaataagcgtgaaatctcgcagtcgattgaagtccaccctcgcctggtcgagcgccgttccgtggccgacggcccgtttgtcgattatcgccgttaacctttcccgcggcgtcggtcattccggcgcccgcagccactcccggtttagcgtttcgctatcgccaaggtaatccagcagccatagcagcgccggcgaggcatcgctttgctgccacgtcaggcagcatgcggcgtccgggaaggggttctccagctccagcgccgtccatgcgccgctatcaagccacgggcgcgctaaatgcccgggtaccataccgacgcacagtccggcggagagacaggtttctgaggcatcccagtccggcaccaccaccctcttctggttatccagcagccaggtggtccgcttcggcagcgagcgcgaggtatcctccctgaccagcgacggccagttgcgcaggacgtcatcgctcagaggcccggccatttgggccagcggatggtggctcgcgacgacgcagtcccagctcagcattcccatatcgcgaaaggcgtagcggccccctaccggaattgagcgcgtcgcgccgatggccagctccacgcgaccgtcggcgagcgcatcccagacgccgttgaacacctcctgaaaaacaatcagttcgacgtcatcaaaatgacgatagaaatcaacgatcatctgccgcatgcgcgtgggtttaacgatattatccaccgcaatagagagctgcccgcgccagccgttggctatctgctggcactgctggcgggtgatctgcatttttttgataacagatcgcccctcctgtaaaaaccagacgccggccggcgttaattccacatcacgatgacggcgttcgaacagcggtaccgccagccactcctccagctgacgcacggtatagctgacggccgagggtacgcggtgcagttcctgcgctgcggcgctaaagctgccgttacgggcgacagcatcgacaacttcaagcgagtattcggaccacattttctgcctgcaaaatttttgaattcacctgacaaatattagcgtttcacaagccttaatgcactccctacactctgcgccatcgtacctgcaacaataaaaagagaagatgatgcaacaacctgggaaaggatttttagtctggctggcaggactcagcgtactgggctttctggcgaccgatatgtatcttccggctttcgccgccatgcaacaagatttgaacacttctgcggcctccgtcagcgctagcctgagcctgttcctggcaggctttgcgctgggccagcttttctgggggcccctttccgatcgctatggccgcaaaccggtgctgttgagcgggctggccatttttgctatcggctgtctggggatgctgtgggttcgcgatgccaacctgatgctcgcgctgcgatttattcaggccctgggggtttgcgccgccgcggtgacctggcaggcgatggtcaccgattattatccagcgcaaagaaccaaccggattttcgccgccattatgccgctggtcggtttatcgccggcgctggcgccgctgctcggcagctggctgctggtccattttgaatggcaggctatttttgccgtgctgttcgcgattaccctgctgctgatgctgcccgccctgcgcctgaagccagcgaacaaaccggttgccagcgcccagcagaagctcacgtttctcaccctgctgcgctcgcgcgagtatagcggtaacgtgctcatctacgccgcctgttccgccagcttttttgcctggctgacggggtcgccgtttattcttcatgaaatgggctatggcccgaccgttatcggcctgagctacgttccgcaaactatcgcgtttctggtgggcggttatggctgccgcgcggcgctgcaaaaatggcagggccagcaaattctgccctggctgctgacgattttcgccctcagcgtcgccgccacctggctggtaggcctgcgggaaaacgccacgctcgttggtttgatgattccgttctgcgccatggcggtggtgaatggcggtatttaccctatcgtcgtcgcgcaggccctgaagccattcccgcaggcgaccggtcgcgccgctgcgctgcaaaacaccctgcagcttggcctctgtttccttaccagcctgctggtctcgacgctgattgccaccccgctgcaaacgaccaccagcgtgatgctggtctccatcgtgctggccgggatgggctaccgcatgcagcacaaagccgcgcatctggaaacaaaatcgtcacatgcttaaggtaatgtgctgatagtgctaagatccagtaattagcttgctaagatatttttgttgaaagcctgtttttagcggcctatactggatccggcgtcacataaatagaaaactaattgattttaacgggagcaggatgcatcccgtttcaccatggaaggcctttcggcaagggttacctcccttcctctgttctacgtcggatagcagcctcacggattatccgtgagatttctcacaaagccaaaaaagcgtctacgctgttttaaggttctgatcacttgggcgtgatggagaagctatgagttcatcgtgtatagaagaagtaagtgtaccaaatgatgactggtaccgaattgcagctgaattattaggccgtgcgggcattgaaattaatggtcctgctccctccgacctgcgaattaaaaaccctctcttttttaagcgcgttttacaggaagggtcgctggggttaggcgagagctatatggacggctggtgggattgtgagcggctggatatatttttccataaagttttacgcgccggtctggaaaatcagcttccccatcatttcaaagataccttgcgtatcgccagcgcacgcttattcaatctgcaaagtaaaaaacgatcctggattgtcggtaaagagcattacgatttaggtaacgatctgttcagccgcatgctcgacccctatatgcagtactcttgcgcttactggaaagacgcgcagactctcgatgacgcgcagcaggcaaaattagatctgatctgccgtaaacttgagcttgagccagggatgcgggtgctggatatcggctgcggctggggcgggctggcttactacatggccaaacattaccaggtcagcgtggttggcgtgaccatctcggcagagcagcagaaaatggcgcagcagcgctgcgcggacctcgacgtcaccatcctgctccaggactatcgcgacctgcacgaaagcttcgatcgtattgtttccgtcggcatgttcgaacatgtcgggcctaaaaattacgccacctattttgatgtggtcgatcgtaatctgaaacccgacggtcgtttcctgctgcataccatcggttcgaaaaaaaccgatcatagcgttgacccgtggattaacaaatatatcttccctaacggctgcctgccgtcggtgcgccatattgccgaagccagcgaatcgcatttcgttatggaagactggcataattttggtgccgactacgacacgacgctgatggcctggtatgagcgcttcctcaccagctggccggaaatcgccgacaactactcggaacgcttcaaacgtatgtttagctattatctgaatgcctgcgctggcgctttccgcgcgcgcgatattcagctctggcaggtggttttttctcgcggggccgaacacggcctgcgcgtggcccgctaaaaatatcccccgcgtcgcgggggtattttttactcggccgccgttttcagtgccgcctctttcgccgccagcacgcgctcgacggtatcgatgaccgcctgagtctgcggatcgatttcaatattcacccgatcgcccagctttttcaccccaagcgtggtgcgctgcagcgtttccgggattaaatgaacgcaaaagcgggttggcgtcacttcaccgacggtgaggctaatcccatctacgccgatatagcctttataaaggatatatttcatcaacgtcgggtcctgaaccttaaaccagatctggcggttattttccgaggtgagaattttcaccacttccgcggtggtcataatatggccggacatcaggtgaccgccaatttcatcgctgaatttcgccgcgcgctcaacgttaacgctgtcgccctcgccgacctcgcccagattggttatacgcagggtctctttcatcaggtcaaaactcactcgcgcgccgtctatataggtgacggtcaagcagcagccgttgtgcgctacggaagccccggtttcgagccccgccagcatatgctcaggcagctccacgacgtgggtgcgaaagttaggtttttcatcgatcgccaccactttggcggtcccctgcacaataccggtaaacatattttgctcctgtataaattcgtgacggtatcagtaccgttttaggctatgacgaacaataacaggtggcaaaacaggttgccagcgcacaacgtgcagtggaattttttcactggctaaatggctaatcctcgctacaatagtctggcaaatccctctgcttttcttcttgctgccacatatggcggcttttttagtcctccaataacaacaatataaaggtgtttacgtgcagaagtattttattgaagcgcgtcagttattagcactggctatacccgttatactcgcccaggtggcgcaaaccgccatgggcttcgtcgataccgtgatggcgggtggctatagcgccaccgacatggcggccgtcgccatcggcacctctatctggctaccggcgatcctctttggccacggcctgctgctggccctgacgcccgttattgcccaactgaatggttccggccgtcgcgagcgtattgctcaccaggtacgccaggggttctggctggctggcttcgtctccctgctggtgatggtcgtgctgtggaacgccggttacattatcagctcaatgcataacatcgacccggcgatggcagagaaggcggtcggctacctgcgggcgctgctgtggggcgcgcccggctatctgttctttcaggtcgctcgcaaccagtgtgaaggcctggcgaaaaccaagccgggtatggtaatgggatttatcggtctgctggtcaacattccggtgaactacatttttatctacggccactttggtatgccggagctcggcggtatcggctgcggcgtggcgacggcatcggtttactgggttatgtttttcagcatgctcttctgggtgcgccgcgcgcgttcgatgcgcgatattcatcacacagagcgcttcagtaaacctgatttcgccgtcatccagcgtctggtacagctgggcctgccgattgcgctggcgctgtttttcgaagtgaccctcttcgccgtcgtggcgctgctggtttcgccgttggggatcgttgacgtcgctgggcatcagatagccctcaacttcagctcgctgatgttcgtcttgccgctctcgctggcggcagcggtgaccattcgcgtcggtttccgtctcgggcagggttccacgctggaggcccagacctcggccagaaccggcgtcggcgtcggggtgtgcatggccgttttcacggcggttttcaccatcctgatgcgcaagcaaatcgcgctgctgtataacgataatcccgaggtggttaccctcgcgtcccagctgatgctgctggcggcgatctaccagatttccgactccattcaggtgatcggcagcggaattctgcgcggctacaaagacacgcgttccatcttctttatcacctttaccgcctactgggtattgggactgccgagcggctacctgctggcgctgaccgatatcgtggtaccgcgcatgggccccgccgggttctggtgcggctttattattggcctcacctccgccgccgtaatgatgatgctgcgcatgcgtttcctgcagcgtcagccttccagcgtcattttacaacgcgcggcgcgctagaccgtcgcggaagcgaagccgctatccaacggcgctgattcagcgccgttttctcatgctggtgaagaaatattcttttgcatcagtaaaatataaccaatatggataaaacttctgcgatcgtgagaaatctggaagaaaagtgacgtttacctcttgccacaacccctccctcccgctaatatgcgtccccgttgccactgcaacattgcgttcatagctcagttggttagagcaccaccttgacatggtgggggtcgttggttcgagtccaattgaacgcaccataatgcgtttatagctcagttggttagagcaccaccttgacatggtgggggtcgttggttcgagtccaattaaacgcaccataatgcgtccgtagctcagttggttagagcaccaccttgacatggtgggggtcggtggttcgagtccactcggacgcaccatttcacagcctcgtgatctggtgccttttatctcccgcattgaaatatccgaaaattactttcagcactggcaatacgctattttctgatttttcccggtcgtgtccttaatatctttcaccattccgacaacttatttcccgcgcttatgtaaattgacgtaaagccctgcgccgcgtctacgctgcatttattaacgcagcggccccgccgatattccctcgcgaataaaaatctttcgttagatcataacccgttatgctgacattcattaaaaacaagcgaaacggtaacagcagtgcaattcagagtatttcaaaaaatatcaccacaaaccggtttgactgttcaaaaataacgactaaatttaatttctgaacgacaacggatacgtacctaaagcgtatcttcctgacataaactcaacaacagaggtatgaaaatatggcagaacatcgtggtggttccggtaatttcgctgaagaccgtgataaagcatctgaagcaggacgtaaaggcggtcagcacagcggtggtaactttaaaaacgatccgcagcgcgcatctgaggccggtaaaaaaggcggccaaaatagccatggcggcgggcgtaaatctgataattcctgatattaatcgcctcattctcttgtaactaaaagagtaacctgcgagtctgcggactcgcagttattctccgtttataaaggtaattaatatgaatatgaagagcatagaagacgtttttattcatcttttatcggatacgtatagcgcagaaaaacaattaacccgcggcctggcgaaactcgccagagcggcctccagcgaacagcttagcgccgcgttcaaggcccacctggaggagactcaggggcaaattgaacgtatcgaccaaattgtcgaacaagagcctgatatcaaaattaaacggatgaaatgcgtggcgatggaggggctgattgaagaagctaacgaagttattgagagcacggagaaaaatgaagtgcgggatgcggcattaattgccgctgcgcaaaaggttgaacattatgaaattgccagctacggcactctcgccactttagcagaacagcttggctataaaaaagcggttaaacttttagcggaaacgttagaagaagaaaaatcaaccgaccttaaattaactgacctggcggtcggcaatattaataaagatgcccaaaataaatagccagagagtaaaccaatattaaggagttgattatgaattatcttgaacattatcacgactggctacgcgatgcgcatgcaatggaaaagcaggcagaatctatgctggaatccatggcgagccgcatcgataattaccctgacctgcgcagcagaattcaacagcacgtaactgaaaccaaacgccaaattacggtactggaggagattctggaccgtaataatatatcacgctcggtgctgaaggattccatgagcaaaatggccgcgttaggtcaatccattggcgggatgttcccttccgatgaaatcgttaaagggtcaattagcggttatgtatttgagcagtttgaaattgcctgttatacctccctccttgccgccgcgaataaagccggcgacaccgcctcaatccccgctatcgaatcgattctggcagaagagcgggccatggccgactggctgctgaaacatattccgcaaacaacggaagagttccttctgcgctctgaagccgaaggcgttgaagcgaaaaaataagcaataaggataagagcctatgttccgacacgttaagcagcttcagtataccgtaagggtcgccgagccgaatccgggactggcgaacctccttctggaacaattcggcgggccccagggcgaactggccgccgcatgccggtattttactcagggcctgagcgatgacgatccgggccgtaaagatatgctgatggacatagccaccgaagagctgagccaccttgaaattatcggctcgctggttggcatgctcaataaaggggccaaaggcgccctggcggaaggcgtggaaaacgaagccgacctgtaccgctcgcttaccgctaacggtaacgacagccatatcacctctttgctatatggcgcaggcacgccgctgaccaactccgccggggtgccctggaccgccgcctatattgatacgattggtgagccaaccgcggatttacgctccaacgtagcggccgaggcgcgagccaaaatcatctatgagcgcctgatcaacgtcactgatgatcccggagtcaaggatgcgctggcttttctgatgacccgggaagccgctcatcagctctctttcgaaaaagcgctccagtccatcagaaacaactatccgccggggaaattaccgcccgtcaatgaatacgccagcacctactacaatatgtcagagggcgacgacattcgcggtagctggaatagcgatcggcactttgagtatgtggcgaatccccagcctgcagtcgacggcggagacggaggcgtcagcgtcaagctaagtgccgagcagcaggcgctggttaaagccatggcggaacgaacccaatccgacccggatggcgatcctcttaccggcgcagagctcggcgcaggcaagaagaagccctaatcctcaataacctgctgttaatcacttccccctgctcaattcggggggttgttctgtgatggggtccggaatatgtttgaactcgacgcgtttaatctggctcggctgcagttcgcatttaccgtctcttttcatatcctttttccggcgattaccatcggactggccagctatctggtggtgctggaggggatgtggctgcggacaaaagatgacgtctggcgctcattgtataatttctggctgaaaatttttgccgttaatttcggcatgggcgtggtttcaggcctggtcatggcttatcaattcggcaccaactggagcggtttctcacagtttgccggtagtattaccggtcccctgctgctttacgaagtgctcaccgccttttttctcgaagccggtttcttaggcgttatgctctttggctggaacaaagttcctcccggcctgcacttcttcaccacctgcatggtggcgctgggcacgctgatgtcaaccttctggatcctcgcgtcaaatagctggatgcagacgccgcagggttttaccattgaaaacggtcatgtcattccccaggactggctggcgattatctttaacccttctttcccctatcgtctgtcccatatggcgattgccgcttttctcagcagcgcgatgttcgtcggcgcctccgccgcctggcatcttctgcggggcaatgatacgccggccatacgtaaaatgttttccatggcgatgtggatggccctgctggtcgcgccggttcaggctatcgttggcgatatgcacgggctcaacacgcttgaacatcagccggcaaaaatcgctgccatagaaggccactgggagaacaaacccggagaagccaccccgctgctgctgtttggcgtgcccgatatggatgaagagcgcaccaaatacgggctggaaatccctgcgcttggcagcctgatcctcacccatagcctgaacaagcaggtcccggcgctgaaagattttccgccgcagaatcggccaaactcccttatcgtcttctggtctttccgcatcatggtcggcatgggcgtgttgatgattgccctcggcgtatggagcctgtggcttcgctaccggcagcgtctttttcactcccgcgcctttcagtggtttgcgctggcgatggggccggcggggctgctggcgctgttggccggctggatcacgaccgaagcgggacgccagccctgggtcatctatggtttattacgcacccgggatgcggtctctctccacagcacagcgcaaatgatcgtcagcctgctggtctttatcgtggtgtactgttcggtgtttggcgtaggttattactacattatccggctgattcagaaagggcctcagcccgtcagcgaattgacatcgacaacctccggtacgccggctcgccccctttccgccgcagaggccgtgcctgaagaggagactcgctaatgggcatcgatatctccgttatctggtttgtcatcatagtgtttgccacgctgatgtatatcattatggacggcttcgatctcggcatcggaatcgtcttcagctttgtgcccaacgccaatgagcgcgacgtgatgatgaacagcgtcgccccggtatgggacggcaatgagacatggcttgtgctgggcggcgcggggctattcggcgcctttccgctggcgtacgccgtcatcaccgatgcgctaacgattccgctcaccgccatgttaattggcctgatctttcgcggcgtcgccttcgaatttcgttttaaggccaccccctctcatcaaaaattctgggattactcatttgtgggcggctcgttgttggccacctttagccaggggatagtcgtgggcgcggtcatcagcggcttcgaggttgccgaccgcaggttcatcggctcagcgctggactggctgacgccctttagcctgttctgcggcttagggctggtggtggcttatacgctcctcggcaccacctggcttatcatgaaaagcgaaggcgcgctgcagcagcgcatgcgtgagctgacccgccacacgcttctggcgctgatggcggtcatcgccgtggtcagcgtctggacgccgctgggctggccgtccgttgctgaacgctggtttaccctgcctaatttctactggtttgtgcccgttcccattctggtactcgtctttagcctgtggatctggcgcctgagcgctcaccccgcgagccacgcccgccctttcctcctgacgctcgggcttatttttctcggcttcagcggcctgggcatcagtctgtggcccaatatcatccctccgcatatcacgctgtgggaagcctccgcgccgccggccagccagctatttatgctggtaggaaccctgcttatcattccggtgattttggtttacaccgcatggagctactacgtattccgcggcaaagtttccggaaatgaaggctatcactgaggtgggctatggctgactggcatacgcgggccattatctatcagattgattcagcactgttttacgatcttaacggcgatggctgcggcgatatcgccgggatcgcggcgaagctgcgctatattcgccgactgggcgcgacggtgatctggataacgcccttctacctgacgccgtttctggatgagggttacgatgtcagcgaccatctgcaggtcgatccgcgatttggtcaactggcggatatcattgcttttatcgagcaggcccgcgaattaggcatgcaggttattattgaattgctgatccagcacacctccgacgctcacccctggtttcaacaagcgcggcgcagccgtcgctcgccgttccgcgactattatctgtgggcagatagcgatgatgacaatacgccgcccatgtttcccggcgtcgaagagagcatctggtcgtgggatgacgaagccgggcaatattttcgccatatgttttaccgccatgaacccgatctcaatctggcctctcccgcggtgatcaaagaggtcgaaaatatcgttatcttttggctgaagctgggggtttccggctttcgtctggatgccgcctcgcatttgacgaaacaggccggacgcggcgaggagaaacgcgggctatggctcctggaacatctgcgtcggctggttgaacaacataatccgcaggccatactgctcggcgaagtcgacgttgaggtggcgcagtatcgcgactattttggcgataataaccgacttaatatggtacttaacttctggttgaacaaatatttttacgtcagcctcgccagccagagcgcccgcccgctgatcgacgccatcaagaaaatggtagtgcctcctgacgcctgctgcttcgcaaactggctgcgcaaccacgatgaactggatcttgaagggatcggtaacaagaacaagcagaccgtgctggatgccttcgcgccggataaggagatgaacgtttatcagcgcggtattcgccgtcggctggcgcccatgctgaacagcgaccggcggcggctggcgttctgtcatgccgtgcttttttcgctgcccggcgtaccgatcatgcgctacggggatgagatcggcatgggtgacgacctggcgctggaagagcgctacgcggtgcgtacgccgatgcagtgggccggttcagcgggcggcggcttctccgcagccgatccgcagacgtttgtggctcccatgatcgaccgggggccgtttcgctatcagaaagtcaacgtcgctgattccctgctgcaccgccattctctcctgcaccgtattattgatatcgccaatacgcggtcagaattcccggaaatcgccgttgcgcctttccgcatcattagcaccgatcggcaggcgattctcgggatctgctacgatgaccgcgagcgcagcgtcatcgcctttcttaatttcagtgataaaccgctgcgttttaccgcgaaagggatctatgcggcggtgtggacgccctgcctggccgacaaaacctacgcggacgcgctcactcccggtaagcacgctaagctggagattagcgcatatggctatcgatggttctggaccaacagtagcgcgctgcgttagcgttttttacgcgagataaaccattttgctaaaagtacccccgccgctgccgcgccgcccagcagcgcttttcccggcacgccggaagtgatggcggtggcgcgatatttcgcctcagaggaaaaacgcccgtgcgttttatgcaatccgctgaccggctgttcgagatagtcctgacggtcgtcggcattcaagcgccgggtcatttgcccttcccacgcttttttgaccatcagccggtcaaggaagcccgggaaaagaaattgcccaataatggactgaatcgtgctgctccctacccagagttcgcgtacgggccggcgcgcgacgttgaagatagcctgggcggccacttccggctgaaataccggcggcaccgggcgcatcgcccaggcaaacttattgcgcgcccactcgaactgcggcgtattcagccccggcatctgtaccatcgcaatactcacgccgctattttcatgcatcagctccgtacgcaccgcatcggtaaaaccccgaatcgcggcctttgccccgcagtaggctgactgtagcggaatggagcgataggcgagcgcggagccaacctggataatcactccgcgatcccggggcgtcatcagcgccagcgcggcgcgagtcccgttgacgtagccgaggtaggtgacctcggttacccgtctaaattcgtcgtgggtcatcgctctgaaaggcgccagcaccgcacacatcgcgttattgacccatacctcgatagccccgagccgattttcgatttcgccggcggcggtcaagagcgcatcggcatttgccacatcggcctgcacggtatgcacccgaacgccgcaacgaaggagctcctgcttcgtcgcctcaaggcttcggccatcgcgggcaataatgccgacgtcatagcctgcccgcgcaaagcgcagggccgttgctttaccgactcccgcagtaccgccagtgatcgccatgactgccatataaacctccgtaataaaagcgttatgcgctctgccagccgggcagtttctcgatgagcatcgccagtgaatagcgtacggctttctccacaacatcctggcactcgccggaaaacagcgttttatgcgcgtcgatactgccgcgaaaattccacgcgaaccagacggtccccgcaggcgtcccgtcatcgccgccgtccggccccgcgtatccgctaatggcgatactgatatccgccccggaacgcgccagcgcgccggtggacatctcttcaacggtctgccgactcacggcgctatatttctccagcgttgaggcgttgacgtcgagaagctgctgtttcgcccgatcgctaaaagtgattaagccaatatcgtagaatgcggccgtatccgcttccgcgcacagcgctgccgccaggctaccgccggtgcaggattccgcggtggttaagcgtaaacgacggtcaatcagcacgctggcgacctgtttagtcagctcgccggtggttttcgcctggttataagggttatttgacataaaaagacctttttaactctcagcaggaataatagaaatgtggccattccgttccagtatggcatatttgattttacttaattccgtaataccctgattctgccgcgcggcgaccagaatatcatcacaggagacgtccacttttttcagcttgtcaattaacggcacgccattttcgactaaaatcaccgggcaaccatcaagcgctgactctgcgccagcggtatatttcttcattaatccgaaaagcatatccacgaccaccagcgtcataatcgtcagcattgcgccggtcaccgaaaaatcgttccccagcagcgcctgctgggtagcctcgctgataataagtaataaaatcagatcaaagctggtcatttgtaatagcgcccggcggccggcgattttaaacaccaccagcaaaattaaatatatcgctaacgcacgcaagaccatctccatcgcatcctcctaaggataaataaattgccagaagcggatttcgggttcgccgtttagctgcaaagagtggttcaacttacctgggcgggtgggcgtaacgtagagccatatagaaaaattattcatgcttttcagatcattatagaccagaaagagccggtcgttctgactgtacatcctgtctggccggggccagatactgtctggttcaaaagaagaggtaaaatcaccgccaaggctaaaaatatatttatccgcgacccgcggatgggcggtaatctttagcctgaattcagtttgcaaacgaccgaagcggtcataggccaccgttaaattgcgctgcgcagttgttttttcggcagtgctaaaatatcctccagaaaagagtcccaaaagggctgccagtatgatcgccaataatattccgaggcctatctggcgggcagcgcattcaaaattaagaaaaaaatcgttctctttaatcccgggcagcctctctttttcacttgccatttttcacctcaccgttgcgcttattatcggggcgccagtttaagaaatagcaacccggcttaatatgtcaagttcgacgcgccaaagccggattaatagcaaaacgcgacatctcgcttgttattcgttgagcagcatcagcatctgtcatacggcgtaatgtttgtggacttcatcaatatcggttatcgaaaagatatcaatgccggttccctggggactatgctcatgtggaaaaatctcaccgcactataccaagaagccgccgagaataatctgaatctgtactactcatatggcatgatgtcaggtgaatacaaaacccgatggtgtcacccggtttcattgggacgatcaatcatctgaatcctggtggggtcaatccccatcagctttttgtcatctgcgttatccagcctgttaagtcgttaatatgtataccccgaggaagaggcgcgccagcaattggccctcttcctcattttgaaccacaattattgggccagatttccgttacccggaaatgatctatcgtggagcttttcaactggcggaaggccaccgacaacaaatgtgataacaacaacggcgggtcagtcattatgaagaaaattgccattatcggtgcaggtccaaccggaatttataccctgttctcattactcaagcagggcgagccgctggacgtgtcaatttacgagcaggccgaggaggcgggcgtgggcatgccctacagcgatgaagagaattcgcgcatgatgctggccaatatcgccagcattgaaatcccccccattcagagcacctatctcgactggctgaaagcccagagccggacgcaccttgcgcgctatggcgtggattacgacgctttgcacgatcgtcaatttttaccgcgcatcctgctgggtgaatactttcgcgaccagtttcttgcgctggtcggagaggccagggagcagggctttcgcatccgggtcaatgagtcctgccgggtcagcgacctgcaggcgaccgaagaaggggtcagactgtgggtcgaggatgagccggtcgctgaagcctttgacctcgcggtgatcgccaccggacacgtctggcccgatgaagaagagtcgacccgcacctggtttcccagcccgtggtctggccttatggaggccagcattcccccctgccgggtgggcattatgggcacctcgctaagcggaattgacgccgcgatggccgtcgccgtccagcacggtcggtttatcgggtctgacgatgacgccctcgccttcaggctggacgaggcaagcgaggcgctaagcatcgtgctgatgtcgcgctccggcattttgccggaagcggatttttactgccccattccctgggagccgctgagcatcgtcagcgaaagcgcgatggaacaagccatcgccgcgggcagcgacggtctgctcgatcgcgtctttgagctggtggcgcaggaaatcacgcttgccgaccccctatggagcgaaaatatcgcccttcacagccttaacgccgacagctttagcgaggcgtggtttgctaaacgccagaagcataatccgttccactgggcgctggataaccttgaagaagttgagcgcaacaagcgcgcgcgatatacggttccctggcgctacgcgatcctgcggctgcatgaagccgttcaggcgatggtgcctcaccttaatgaccatgaccgggagcgtttcaaaaatggccttgcgcgggtctttatcgactgctatgccgccattccttcggagtccatccgccggctgctggcgctgcgcgaagcgggcgtcatcagtattctcgccttagggcatgactatgagatggcggtagagcaggaaaaaacggtgattaccagcgaacaaaatcgctatacgtttgatgtgtttattgatgccagagggcaaaagcctctgaaaaataaagatcttcccttcccgcatttaagggagcagctgctggcgaccggagaagagattcctgatgtcggtgacgactatacgttgcgggaaccgcccgaagtacgggggcgcatcgcgttcgccgccattccctggctgatgcacgaccagcctttcgttcagggtatcaccgcctgcgcggagatcggcgcggcgatagcgaaagcgatatcccagccggcaagccgctcgcgcaggcgtttatccccgctcgatctgtaggaaagaaaaatagccgcccgttgacgggcggctattgttaacgcttttcaggctggggatgccagggatcttttttatgatcttcgctgtcgtctcttttacgcggcacttccccctgctcgcgcgggtcctctttcgacggatgacggccccgcttatccgggtcggctggatgctgtacggacatcaattcctcctgcttgagcggttatttctggatccggtccacccgcactaccggcggcgtcatttttttatcgaggctgccgttgatgctgatcatctgatcgggcttcacttcgcggccatcaaaaaccgcggcggggataatcactgcaatggtgtcggttttatcgcgaaagctgtagcggtcattaccgtgctgctcgataagattgccgcgtaatgagatggttgccccatcgtgcatttccagggcctggcgcacggtcataattcgcccgtcctccgtcccgcggtagccatcgtcaattttatgcggtggcggcggagcggcatcttttttaaatcccccgtcatccgcggcataaacgccctgagccattagcgcacagaaaataacggacagtaattttttcatcaaccatacctccggcatatttttgtcttgtcttaataagtctggttgctgatgttcattttcacaagttccgtacctgatgaatcgcccgggaaatattttttacgacttcaccgcccgcgtaaatatgcgcaccgggcagcattaaaaaggcgctaaatataccgtcgggcttgcgatagaataatcctaaaatgccaaacgctgctggtgcctctcattttgaaaagtttcccggcaatcagtaaattaccgttgggaaaggaatcaaagcgccaaaattataaaagcgaagccgttcaattattcttcaatattccacggcaggctgaccaggcaactacgcttactcttttaacacgaggaggtcagtatgagcgacaacgctaacaataccgagaagtatccccgtcccccctttgttgaccagccgcaatcgccgccgggtcttgccgaagagatgaagccgcagccggatcacggtgagctgagctatgtcggttccggtcggctcgccggtaagcgcgccctgattaccggcggcgattccgggattgggcgcgcggtcgcgatcgccttcgcccgcgaaggcgccgatgtggcgataaactatctgccggaagaggagtccgatgcggaaaccgtagttgccctgattcaggccgaaggacgtaaagccgtcgcgattccgggagatgtgcgcgacgaatccttctgcgaaaccctggtggaacaggccgccagcgaactcggcgggctggatattctggtcaataacgccggacgccagcaatattgcgaatcactggaagaactcaccaccgccgactttgacgccaccttcaaaaccaacgtttatgcggccttctggatcaccaaagccgccctgcgtcatcttaaagaacacagcgcgattattaatacttcatccgtccaggcctttaagccgagccccatcctgctggactacgcgcaaaccaaagcctgcctggtggcgttcacgaaatcgctggccaaacagctggggccgaagggtatccgggtaaacgcggtcgcccccggcccctactggacggtgctgcagtcaagcggcggccagccggatgagaaggtgcgtcagttcggcgccgatacgccgctggggcgtcccgggcagccggtggagattgcgccgctgtacgttacccttgcctctgatgcctgctccttcacctccggccaggtgtggtgctccgacggcggcgacggcgtgctgtaaatcccgcgcggcggcgcgccctcagcggtgcgccgtcgtcttaagacaggcgaggtatttctgcgctgagtctaaaacgatctgccgggcatttttggggacgttctgccccttaaaggcgccgtacagcgccccgaaaggcgtatcgcccagacgttcaacgatcttctccacgctggcggccgccaacggcagcaaattgggatagctccacataaacgaaacggcgcgcccccccggcgtcacctggataatatcgcccgccagcataataccgtcatctttcgcccagtgcagaacggttcctccggcgaaatggccgcccaggcgcagcagccgcaccgccgggaggatctccagcgcatctccttcccatagcgtgatggccgggctatcgcgcataatccattcgcgatcgctggcgtggagataaattcgcgcattaaaggcgtcggcccagtcctgcatcgtggtgtagtaatgaggatgggagatggcgatcgcgtttatcccgcccagggcggtaatcagcgttttgctggcggcatcaagattggcgatgcagtcccagagaatattcccctgcggcgtgagcagcagaaacgcgcgctgaccgattgcaaatttcggtaccgtcctgacgctcaacagccgatcgttatgctgctgccacgtattcgtatgcgtctcggtcagatcgtctggcttgatccagacctgcccgctggccgggacgtactggcgttcatcctcacagatacgacaatggttcagggtgttgccgcgatcgtcataagacgtcccgcaggttgcgcacagcttaatcatcacttctccttaagaaatcattcaggaagccgtaatgagtatggcagacaggaaatttatggcaggaggtgggcatctcagggcttccgtgccctgaaagagaagtttattcgaaataaacgtcagggttttccgacagcgacacaaaggttttgctgtttttatccagcgcgcgaatgtcaccgctttcaatatcgtagaaccagccgtgcagacgcaacgtgctatcccgcagacccacggcaaccgacgggtgggttttaatattgttcagctgggcgataacgttttcctgcaccataccgttgactttatcggtctcgttggcccaggttttcttctccacgacggctttcgctgcatcggagtagcgcagccagtgggacacggcaggcatggggtccaggcactggcaggtggcgatggctttcatcgcgccgcagttggagtggccgcaaatgacgatatcggtcacgcccagggccacaacggcatactcgatcgtcgcggaaaccccgcccggctcaggaccgaaagagggcacgatattcccggcgttacggatcacaaacagctggcccggctcctgctgggtcaccagctccggcaccaggcggctatcggaacaagagataaacagcgctttaggattttggctggaggccaggctgcggaagagctctttacgttgcgggaaaatctctttctggaagttgaggaagccctcaatgatatgttgcatagcagtgtctcttttctctgttttaatgacgatatgacaaagatcacatttagccagtttatcaccgacgcgcgaaatgggaatcgttattcgaacaggcgatgaaacatcgcgccgtaaagtcgggtgacagcacgctaaagattgtttattttttgacggtgaaacaatcatgagcgggagccggatgcgactttagcgctcaacatcaaccaggagcgtttatgtttttatccagcctgatggccattgccgccgtactcattatgggcgtgatcagccccggcccaagctttatttacgtggcccgcaacgccgttgcgcgctcaaggatgcatggtctggtcaccgcgctgggaaccgggacgggggcggctatcttttcgattatggccatgatggggctgcaaaaagtgctgaccgcggtgccggaaatgtttattggcctgaaggtcgcgggcggcctctatctgctctggctggggtataaaatctaccgcggcgcggcgcagccgatggattttgcggcaggcggcatggcggcggaacattccctgctgaaaaccttccgcgatggcctctatacccagctcagcaacccaaaaacggcgctggtgttcgcctctatttttaccgccctgctgccggagcgcatcccgctggccttttactatatcgtgccgctgatgagcttcctgattgacgtcagctggtattcgctggtagccctggtgctctcttccgcgcgaccgcgcagcgtctacctgcgcatgaagcgtaagatcgatatcgtcaccgccacggtgctgggcgcgctcggcctgcgcctgattgccacttcgctgtcaaagtaggccagcaaaccgtttaaacggtataaatacgaatatcgtgttcgctaaacgcgtcgcgatattcgcgactgatattctcctcgaccaccagcacgtcaatggcgctgctttcgaccaccacaaagcgcgccaccgcagggattttgtccgaggtcaggccgacgatgatttcgctgcactgttttatcaccgcttttttaaattcacagtcggcgtagtcaaagcccgtcagaccggactcaggcgccatggcgcagccgccgataaatccctgttcgaagagcatgccctgaatctgcgccacggcggaggcgcccacgcagccgccgctggcccgctggatctgacctccaagcatcaccacatcatacagcggttttttgagcagtacggcagcgatctcgggagaattcgtgaccaccgttaacgccagctccgccggcagcgcttccgccatcgccaggttggtggtgccggtatcgataaaaatgcagccgccgggcttcaccagctttgcgcacttctgcgcgatcctgctttttgtcgccgtatttttttctttgcgctcgctatagtcccccgcctccggcagggtcatcaccgcgccgccgtagacctttttacagtacccttcgcggctaagttcatgtaaatcacggcgaatagtatgctcggagacgttaaggcggctggcgagttcggcgcaaaccaccctgccgttctcctgcaggatctggcaaataagcgcttgtcgttgtttaggaaaagcagcataatcgagcacaaataactcctgataaaatctttatcgagcaacaaagtgcataatcgtgcattcagcccctgactgtcaatacaccctataaagaggtttgctatgaaaattgcccacatcgccctatggacccgccagcttgagcaacaggcccgcttttgggtggccttcttcgacggcgagattaatgagaagtactgcagccaaaccaacccgggctttgagtccttttttgtcaagattggcgacggcattgccattgagctgatgaccaagccggggcttgtcgcgcagacggcggataacaaccacaccggctgggtacacctggcgattaccgttggcggcgctgaaaaggtggatatgctggcaaaccgcgccgctgcgcaggggattctggtctcgccgccgcggaccaccggcgatggctattatgaagcggtgattaaagaccccgatggcaacctgattgaaatcgtcgcatagtatcaggcactgactcaacaggagacgcccgtggccaactatcgcgtaatcgacaaacaaaactggccgcgaaaagatcattttgatttttatcgcggttttgccaaccccagctttaatctctgcgttcctgtcgaagcgcagcggctatatgagtgcgcgaaagatcgcggcgtctcgtttttccagctggcgctctacgccctggttcgcgcggcgaacggggtgccgcagctgaaacagcggcagttgggtgacgatattatcgaatatgaccagctggcggtaatgacgccggtgatgaccgcccaggaaggctttcgccaggtctggtgcgacaacgccgccgattttgccgccttcagccatgccgccacgccgaacattgaagcggcgaaacataccgcgccggcaccgcttatcgtcaacggcgagaatttcttctgcgccagctgcctgccgtggctgcatttcagcgccatcactcacgcggagtattacgtcggcgcggcggtgcctgccctcacctggggcaagctgaaaaacggcattatcccggtggcgggcaaattcaatcacgcctttgttgacggcctgcacgccagccgcttctttgcccgggtcgaagagggtttcgccgagccggagaccctctggcagacgccataaacatttggcttacgtcacggggctgcccgcgatcgctgcacactacatactgcttaccgcggcattgcggccggatggcagcccttcaccccgtaaacagcagagaatgctggcgcttagcgcaaaaatgacagattaattctgaattattgctaatgctaaatcgctataagccatagcttttcggtgttagacagggcgcggtgcgcctcttatctttcgtcatgatttgtaaatattttacgcaattctttgatgagggagcacttttgtccagactactgcacgggttaaaaagcaaacagacgcggttcgcgcttgctctgaaaatcgcgttgctcggcggcgcggtggcattttcttcggtcgccatcgccgacgacattttaaaagaagggatcaccccggccagcgatgccagccagatccccgcggccgcgaagctgcgcaaagataccgtcgtggccggcatctccgagccgcagggcatttttaacccctacttcttcgtcaacggctgggatgagaacgtcaccaacgtgattttctctcgcctgatcgactgggacagccacggcaatctggtgccgggtctcgccgaaagctggacggtgagtccggataacaaggtctacaccatcaagctgcgccccaacctgacctttagcgacggttcgccgctgaccgccgacgatgtcgcctttacccttaccgtgctgctggatccgaaatacgacggcgataccgatatcacgctcgccaatattgccggcggcgcggagtacaaagcggcgaaagccgatagcgtcagcggtctgaaagtgcttgaccccttaacgctgcaggtgaccaccacccagccgggcgcgacgacgctggcaaaaattggcggtccggtactctccagagcctattacggcaaaggctaccagcgcggcaatctcgactatctgcgcaccctgcacggcaaaccgctgggcaacggtccctacgtttacgacaaatacatccccggccaggagattcgtttccacgccaacagccatttttatcgcggtacgccgcccactccgcgctttatctatcgcgtgaccaacccgtcaaccaacttccagctcttccagacgggtgaaaccgactacgacgcctttacctcgcgtcctgacgatatcgaacagctgaaaatgctcggctttgccaacatcaacctttacggctccagcgactacagccaggtggaatttaacgtccgccgcccggcgctgaaggacgtgaaggtacgccaggcgctgatttacggcctcgaccgtcagaagctgattgatgtggtctaccagggctacggcaaggtggcgattgagcctatcgcgccgatctcctgggcatggaacgccgagggggtgaacccgtatcactatgacccggcgcaggcgaaaaagctgcttgacgaagccggctggaaaccggggccggacggtatccgcgtcaaagagggcaaacgcctggagttaacgctgctggtgagcaagaaagtgctcaacgatgcgctgatccccatcgccaaagagaactggcagcagatcggcgtcctgttaaaaccgcaggtcgtcgatttcaacgccctgatggcgcagcgtaagtcgggtaattacgatctggcgtcgttcagcaccagtacccttaacgacccgcatgatggcgtgtgggatttttacagcgcggaagcgaaagagtccggctataacaacccgcaggtcgataagctgattaccgaaggtaactcggtgctcgaggtcgagaaacgtaagcctatctaccaccagctgtatcaggtactggcgcaggacccgccggtgatccttctcggctaccgtgaaattctctcggcgagcagcgcccgggtcaccggcttcaaaccggatatctacaacggcctgaccggcagcctgccggatgtcaaaatcgttaagtaaatccccggccgccgggatgaccggcggctgacgtgagaatgtcatgagaaatttcatcctgagacggctgctgcaaacgctgccgatgctgctgctggcctccttgattatctttatgctgtttgccaaaacgccgggcgattttatcgacggcaatatcaccctcacagctgcccgcgccgccgaactgaaagccatttacggcctggatcagccgctgctcacccgctatatccactggctcggccagctgctgcgcggcgatctcgggttttcgctgcagtaccagatcccggtcagccagctgctcaaccagtacatctggaactccttcctgctggccagcgtggcgctggtgttttactggggaattggcctgacggtgggcgtggtctcagcgctgaagcccaattctgcgttcgatcatctggtgagcgtcgcggtgttcgccgccatgtcgttcccgaccttttttctctgtctgctgctcatcaagtggttcgccgtcgacctgcactggctaccggtgggcggcatgaccaataccggcagcgacgacagcggctgggagtatgtgctgcaggtcgccgcccatctggtgctgccggtactggcgctggtgatgctccaggcgggcagcctgacccgctattttcgcgccagcatgctcgacgtggtgaaaatggattttatccgcaccgcccgcgcgaaagggctgcgcgaacgcacggttatcctgaagcacgccctgcgtaacgccctgctgccgatcatcaccctgctcggcttcgagctgccggggctgttctccggggcgatcattaccgaaaaagtgtttaactggccgggggccgggcatattcatatcgattcgctggccgcccgcgactacccggtgttaatgggctttaccctgtttctggcggtgctgaccattcttggcaacctgattgccgatgtgctttacgcgtgggtcgacccgcgcattcgcgtgaggtcctgatgctcagctctctgttttctgctaaccgacgcctgcgcaaggcggaaatcccggcgctggcgcaggtgaccccatccccctggcgtcaggcctggcaggcgctgcgccgcaatcgcctggcgatgctgtgcctgctgctgctggtcgtaatggccctctggtgcatactggggccgctgtggtcgccgtggaaagacgatgccaccgacgcgctgatgattaacaggccgcccggcgcggaacactggctgggtaccgactttctcggtcgcgatatttacacccgcctgctgctggccgggcgcatttcgctgattatcggcctgctgaccatgctgctgtcggtcacccttggctatctgctcggcgcgctgtcgggctacgccggcggcctgaccgataaacttattatgcgttttgccgatctggtgatgactatccccggcctgccgctgctgattgtcgcgggcgcgatgctctcggagctcgatttctcaccggactcacgcatctatatggtggtgattatgctgagcctgctggagtggccgaagctggcgcggctggtacgcgggcagtgcctctccctgcgcgagcgcgactttatgctggcgacccaggtgctgggactgtcggcgcgacgccgtctgtttggtcatctgctgccgaatacggtaccgattctggtggtgatggcaaccatggcggtggcgaacgccatcctcagcgagtcggcgctcagctacctcgggcttggcgtggtaccgccgacgccgtcgtggggcaatatgatggacgccgccaacagcctgatcgactttcagcgccggccctggctgtggatgccgccggggatcgccatttttatcaccgtcatcgccatcaacgtgctgggcgacggcctgcgcgacgccatggaccctaaaatgaaacagaggctgaaatgagtcgcgcattaatcacctttaatcagctttcggtctcttttgccgccgacaaaaaccgggtacgcgcggtacaggatgtgtcgttcactattcgcgccgggcagaccgttggcgtggtcggcgaatccggctgcggcaaaagcgtcaccgccatgtcgttaatgggtctgctgccaccgcaggcggcgcgcattgacggcggggaaattctttttgagggccaggacctgctgcggctgaaaaacgcccgtatggccgacctgcgcggcaatcagctggcgatgatttttcaggagccgatgaccgccctgaatcctgtactcaccgtcggcgagcagctctgcgaaccgctgattcgccaccgcggcgagccgccgaaggccgcatggcaacacgctacccagcgcctgacggatgtcgggctggcgcgcgcggagagcctgatggccagctatccgcatcagctttccggcggcatgctgcagcgggtgatgattgccatggcgctgagctgccagccgaagctgctgattgccgatgagccgacaaccgccctggacgtcaccgtgcaggcgcagatcctgcgcctgctgcgcgaccaggcgcgggccaaccggatggcgatgatgctgattacccacgatctcggggttatcgcgcagatggccgagcacgttgtggtgatgtacgccgggcgtatcgtcgagcagggcgcgaccgccgcgattctgcgtcacccgcagcatccctatactcaggggctgattgcctcgcggccggtgccgggggcgcggcgccgacgcctctattcaatccccggccaggtgccggacctcgccgcccttcccgccggatgcgcctttgccgagcgctgcgcaaaagccaccgcgcgctgccgacagagcattccgccgctgtcagggcaagaccggcaggccgcctgcttttactgtgaactttcggagtccgtgacatgagtcatgaatacgtgattgaagtggatgggctgaaaaaacacttcccgctgcgcgatgggctgttcggtcagcagaccggcgtactgcgggcggtggatggcgtgagctttaagattcgccggggaacgatttttggtctggtgggcgaatccggcagcgggaaaaccaccgttggccgcacgctgctggggctgtatgagaagaccgccggcagcgtcaagtttcgcggtcaggaacttgccgaactgccgccgcgggcaatgcgcgcgctgcggcctaaaatccagctggtgtttcaggacccttacagttcgttaaacccgcgcattcgcatcggcgacgctattggcgaggcgatgctggagcacaagctctgtcgccgggcggagctgtatgataaaacccttgaggtgatgcgcatctgcgggctggcgccgcagcattacaaccgcttcccgcacgaattttccggcggccagcgtcagcgcatcggcattgcccgggcgctgatcttaaacccggattttattattgccgatgagccgatttcggccctcgatgtgtcgattcaggcgcagattattaatctgttttccgatctgcgcgacgatcatggggtgacgtttttgtttatctcccacgatctcggggtggtagaacatctctgcgatgacgtggcggtgatgtatctcgggcagctggtggagaccgccagccgcgatgcgctattcagccggcctttgcatccctacacccgggcgctgctggcggcggtaccgaccctcgatccggacagcgagccggtcgcggtggtgcaaggtgaaattcccgacccgtcccggccgccttccggctgtcgcttttccacccgctgcccgcaggccagcgaccgctgccgtcgcgatattccactattaagggaggtcgccgacggccaccacgtcgcctgtcacgcggtttagcgccggccaggcttcggaccataaaaaaaccgcccacaggggcggttacttgcgcaaaagcgaaacggctgcggctactcttccagcgcgaaggcaataatatcatcgcccacgtccggcgagtggctggcgcccccggcggagatcaccacgtactctttaccgcttttcggtgatttatagatcagcggcgccgccactgccccaaccggcagacgagcgcgccacagctctttaccggtggcggaatccagcgcgcgcaggtagttatcctgagttcccgcgaagaacaccagtccggaagcggttgacgtcgggccgcccagcgtcggcatgcccagcgggatatgcatgtgcgttttcagccccagcggaccggtatcctccaccgaccccatcggcacctgccacaacagctggcgagtgttgaggtcaatggcgctcatggtgccaaacggcggggtattacagggaacgcccagcgccgactgcaaaatatcgatccgcacgccgccgtatggcccggcaatttgcggccgcacggttcccataaagccgggcacctcgtcggtggagactttatatttcgccatatcctctttgcgcaccagcgacattctcaacggcatccgcatatcgttgacgaacagcgttcctgtgcgctcatcgatagtgataccgccccagttcatgccccccagcaggcttggccactcgatgtacggcttctctgacggcggcgtgtacatgccaagataagtcgacgctttgaagtcgatacggcacatcagctgatcgaacggcgtcacgccccacatcgatttctcggtgagcggctcgacgcccagctgcggcatgccggtggagaacggctgggtggcggagagatgctcgccttccgcgccgtcatgggcgacaggctgctcttccacgcgggtcaccggcttaccggtacgccggtcgagtacgtaaatctgcccggttttggtggtctggatcagaaccggaacctcttcgccccgctcgtttttcatatggaacagtaccggctgcgacggcaggtcatagtcccagatatcatgatgcacggtctggaagacccacttcgtctcgccggtgctggcgtccaccgccaccacggaagatccgtatttctctttggccgcgttgcgatcgccgccccagtagtccggcggaccgttaccggtcggcagataaatcaggttcagctctttgtcaaagcccggcaccgtccagacgttcggcgtttcgagggtatagacgcgaccttttaccgggtcggtaacgttttccggctggccgacgtcccacgcccacaccacgtttccgttacgtacgtcaaacgcgcgtaccaccccggacggctccccgtgcacgatatcgcgcacccagccgccgagcaccgcaatatgtcccataatcaccggcgttgaggtcgggtggtagcgtttgctgttttcggtattgtccataccctgtttcagatcgacgctaccgtggtcgccgaagtcatcgcacagttcgccggttttggcgttcagggcgatcaaacgggcgtcgaccgtggacaccagaatacgctgcgggcactgctgcagcgccgggctggccttctcttctgcgctcagcgaatcatcgctttgtacatcgtaatagccgaccccgcgacaggtgacgtgttcggcggtacttgcgtgcgggtcaaaacgccagcgcgctttcccggtatccgcatccagcgccgtgaccacgttcagcggcgtacaggagtacagcgtgtcgccaatttgcagcggggtattttcatcgacgccaatcccggcgccggttagccggcggccggtgtgatacgtccaggcgactttcaggtttttgacgttttgcggcgtgatctcatcgtacggcgcaaaacgggtgccggaggcatcgcgaccgaaaaacgcccagttatcgctttttgacgccagggtcggcgtgctggcgtcgctcgctttcaccacgccgtgatgaataccgccgtgcgggtagaaggcggagaccagcgtcgccagcagcaggaggaaaatcgccgaggcgctccagttggcgtagcgtctgcgcgcaggccggatcggcagcgtcgccgccagccacagcgccagcatcagcatcagcgcgggaacgaccagccgggggatcaggccccaatagctgagctgcacttcatacagcgcccagcaaagggtcaacaggaaagtcagaatggcaaaaggcaggacatagcggctgcggacaagatagccgacggcgataagcagataagcgagaccggctaacagataccaggcgctgccgccgagagagaggagtttgcccccccagatagtgaaaaagagtccagtgccaaagcttagtaatgcaaaaagtacccggtaaacggtaaagaacaggcccctaccgccaccttgttgttcgtccatatttcatcccatacgacatcagtcgaaaaaaccaaaacatcttatataaacagcgcattatcagacaaataaaagcgcataccgcatatcatgttggttggacgctcccggacagagcgaagaacgtaaggaattatatgtatttgtaaaaataatgtaaaactatcaggcattaaatgtttaaatttttttaatttataaaagtaagttgaacgaatgatgagttataacgaaagccgtaaagcccgcgttgcattcgctgttaagcgcgtttcgatcctggcgaatcagtccgatccgtcttgctatcctcaccccgctgtttaatcatacccggcgcgttcatttgaccgcttacatcgggcgaagccattcgccttcacaccggaaggggaaaaatttcatggctgttcaggagattaaacatgaataaacgaaaatatctcaccgaaatggagataaaaaaaatcatcaacgaggcgtacaagggagcgaacccggagagggatcgttgtttaatctggatgtgcttcattcacggttgccgtgttagcgaaattcgccactggcggctatctgaccttgacctgcataaccactcaatttacgtcaaacggcttaaaaatgggttttccacaacgcatcctctcttttcgagcgagatgacgtttatccgtgaatggctgtcggtgcgtaaaaactatcgcaacagcgacagcgactggctatttctttcgcaaaaaggaacgccgctatcgcgtcagcggatccacgtactgattagccactatagccaaagtgcgggtttaagaattgcggcccatccgcatatgctgcgccacgcctgcggtttttcgctggccgataaaggcatggatacccggctaattcaggattatctcggtcacagaaatattcagcatacggtgctttatactgcgagcaatgctgcaagatttaaaaatatatggtgacgcgacaaccaatatatttcttacttgacataatgtatcagattgtcactaacataataaatcaccaataccctgtcaacccgtaaggtttttcgtaactcgaataatttaaaacattaattatcaatagattagcaactagcgcgcatgttccagcaaaccttaacctcagccgccaccctccgaaacaccagattatttaccatacacccctgaattattggtttttaatatcgcaaaaatagccatccatggcatctatatctaaaaaatcaataaacaaaatagataaaactaaacatgacactttgatacaaaatgtcttctgcagaaataaatctcagcgtcactggatctatttcagcacgacatctggctatcagattaataaaggctcatgagaaatttatttctgtgaagctattacctttctatattgcatataaggactatcttatgaacaagagtcttattgctgttggtctgttagccggtgtcatgtccgcatccgcattcgcggatgatggccgtattgaattttacggctccatcaccgatagcgcctgtaccgtgatcaatcatatgaccaacccgctgacggtcatgatggggaatgtctccagcaaagccttcaacggcgcgggctccacggcctcggcaaccaaatttattattgagctgaaagattgcccgaaatccgctaagtcggccacggtaaaattcgacggcacggcggatagcagcgttggcactattctggcgctcacccagcaaccgggcgtagctaaaggtgttgggatccaattaatggataataaaaacgtcgtcgtcccattatataccgcctcatccgcttacccgctgcagccgggcggaaatagtctcgctttcgtcgctcgctattatgcgacatcaaacaccgtaaacgcagggttcgctaactcaaccagcacatttaccctcaattacaactaacggatatttcgtcggcgtatttcttttgcgctggcgttatttccgcggaccggcagcggccggtccgtcctttttcgtatttgtggagtcaatagctatcatgcataaaggatatagagtatttcccctcctccttctggtgctggcgagcgaattagcggcggcgacagaaagcggcggcgtcactattggcggcacgcgactgatttttgatggcggcaaaaaagaggcctctttaagcgtcagcaattcggataccggcccatatctgatccagtcgtgggtggagccgaacaataacgatccggccaggccgccgtttattattaccccgccgctgttccgcctcgacggcaatcagcaaaacctgctgcggatcgtcaataccggcggccagctcccaaccgatcgcgagtcgctttattggctaaacgtcaaagctattccgacaaataccgccccggaaaacgcgaatacgttgcaaatcgccgtaaggacgcgcctcaagcttatttatcgccccaacacgctgaagggtatcccggaagaggtgacccataagctgcgatggcgccagacgggcagcaggctaacggtatcgaatccgacgccgttttacatgaatttcaacgaggtcacggtgggcaatcatcccattaccgaagccacctttgtcgcaccaatgagctcagccacgtttgctacccccggcaaggtgaccggcctggtgtcatggaaaatcattaacgactttggcggcgtgggtaaaagccacacgcaggttcgctaacccgccgctgccgacggtttgcgctgcggcaattgccgtcagttcaggagcctttcaggatgaacaaaaaaacgttaagcgactcgcctttgaatttagcttaccttatcgccacccaggttgccctcattgtggtgataagcccctatgcttacgcccgtgaacggttcaaccccgcccatctggaagccggcgcaggcggtctggccaccaccgatctctccgccttcgaggtgcgtggcgggcagcagcccggccgctacagggtggatatttatgtcaatgacagcaaggtggatacccgggacgttgagttccgcatgcagcaaaacgcgcagggacagagcgcattacagccctgtctctccctgaacgatttggcctcatggggcgtcatgatccagcgttatccgacgttaggccagcccgatgccagctgcgcaaggctgtcggcgattcctcaggccagcgccgactttcgtttctcgcaccagcagctgctgttaagttttccccaatcctcccttaccaacgccgcgcgcggctgggtcgatcctgcgcggtgggatgacggcattccggcggcgctggttaattacagcgtcagcggcgccaacaaccgggacaaaaaaggcgacgacggcgacggaaacgcgcagtacattaatttacgtcccggtcttaatatcggtccctggcgattgcgtaattacaccacctggaaccgcagccatcagggtggcgaaaacggcacctcaacaaaatgggataccgtttatacctacgcccagcgcgatatacgcacgctgaagagccgactgacgctgggcgatagcaccacgccttccgatattttcgacagtattccgtttcgcggcggccagcttgcgtctgatgacgatatgctgccggagagcctgcgcggctatgcccccgttgtgcgggggattgctcgcacccatgcccaggttacgatccggcaaaacgaatacatcatttatcagacctacgtttcgcccggcagcttcgaaatcaccgatatgtaccccaccggcggttccggggacctgtacgttaccatcaaagagtctgacggcagcgaacaattcctcgtggtgccctacgcctcggtcccggtgctgcagcgcgaaggtcggttaaaatacgccatgaccgccggcgtttaccgcgcctatgacaacggcattgataaagctccgctggccgccggcacggcgatttatggccttcccgccggctacaccgtatacggtggcggccagttcagtaaaagataccaggcgttagctctgggcataggtaaaaacctgggtcccattggcgccctatccaccgatatcacccaggcctggtcgcagcaaaaaaatcgaccacgagaagaaggccaatcctggcgtattcgctacagcaaaaacctggtgcagaccgggactaacttcaccttcgcgggctatcgctatgccaccagcggctactgggatatgcaggacgttctcaatacctggcgcgacggacggcgctacgtgatgccggaacgccgacgcaaccgcgccgagttaaccgtcagccagaacctgtttcagataccaggcaacctcgcgcttagcgccatcgtggaagactattggggtacacacaagcgcatggagtcatatagcgcgagctacaacggttcgtacaaaggcatcagtttcggtctgagctacagctataacattcactcaacggaacgctacggccagcggtccgggcgcacctacgaccgcgatgggctgtttgcgctcaccatgagtattccactggataaattattcgacggccatcccacctacgccagctacatgatgaataccagtaagcagggaaataccaccaataacgtgagcctgggcggtaccctgctggccgataacaatctgagctggagcgtcatgcagggctatggttctcagggccagggaagcaatagcgggattaatgccgactggcgcgcctcttacgccgagaccctcgtcggctacgcccgcgatcgctacagcgaacgcgttaactatggtttgcagggcgggatcgttgcgcatcgcaacggcctcacctttagccagcccctcggcgaaacgatggcgctgattgccgcgcccggcgcgcaaaacgtagcggtgcttggacagataggcgtcaaaaccgatcgcttcggctataccgtcgttccctacctcagcccctatcgcaaaaacgatctcacgctgaataccgaaaccctggccgatgatgccgaactggcgctggcaacgcagacggtcatccccacgcgcggcgcgctggtgaaggccagctatgaaaccagcctcggtaaacgggtcctgatgaccctgagaaaacgcaacggcgcgtcggtaccgttcggcgcaacggttatcgatcccgcctccacgacgccaaaaagcttcatcgtaggtgatggaggacaggtttatctgacagggctaaaagacgcgggtcagctggaggttagctggagtcacgaccctgatggccggtgcagagtgaattacagcctgacgcaaaacgccggcgggattatcaaccttaatgcacagtgtttatagcaggagcatgacgatatgaaacgagtcaacgtcccccttatgctggttattcccatcgcaagcgcagcccacgcggagagcggctattgtcccagctccccgcccacgccgtttacccagcagcttgcgcggatcgcggtatcgcggacgctgccggttggcagcgatattcccggcacgcagcgggtcttcacctttagcggaaattgcaagggtcaaagcggttgggcggatgtcactcgagggcacccgattgtcgcctgctattacggcagcggagaagaagtggcgggttttccgggggtctataaaaccggcgtcgaaggcatcggtattgcgctgcaaaatagcgccggccagagggtgagaggtatcggcagcgactgcgatacgcgcgcgcaggcgctgggatacacctccagcgacgccagcatgaccttcggatatacgatcacattaacgctggtaaaaacgggggatacggtaatgaacgggactctcgatgtcgcgcaaaccaagttcggtatgggtgcatatgataccggtataggtatcggtaatcggggagaccttaactatataagctatgccggagatattgtttataaagcggtaagctgcaccgtcccctcgtcgttaactgtcaacatgggttctgttccggtgggccaattctctggtccaggcagcaccagcgacgaaaaaaacctgtcaattccggtgcggtgcgacgataaggtcgccgtgaatacgtcaataagcagtcaaggttatctctccccgacgctcggcgtagtggccttaagcagtgaaaccggcgtagcccagggggtcggcgttcaggtgctttataacggctcgcccgttcagttcgatcgttttttcccggtcggcaccatccctgaggctggcgcctcgataaccctgccgctcacctttcgctattaccagaacacgccggagattcatcccggccatgccaacgcggtggccaccttaacgatgatgtacaactgagtttatcccgctctcgtttctcactgcttacttaaggagtcgataatgagaattatcgccagcccggccgtcataacgttatttacggcgatttcgtcgtcattacccgcttatgccgcggatgtcactctttatatcaacggcgatattgttgcttcttcctgcaccgtcgaaaataacggtatttataatatcgatctcggacataatattcccagccgccggcttagcgcggccaactcttactccgcctggaaagagttttacgtcacgctgagccactgtcccgtggggacatcaagagttaccgctcactttacaggccctgttgacggagctgaccctgatttatatgccaacgtgagcagccccgatagttcacgcaatgtcgcgatagaacttcagcgtataaccggttcagtaaatgccggcagcggaaaatctattgccgtcgacgtcgataataaccgtcaggccatattcgatatgcgggcgcgcatttttagcgtcgcagggggtgccaccgcgggtaatattagcgcaatggtcgttatgaattttacctataactaaaggttatctggctcttaccgagccagatactccggcttcagagggtaattgagctaaagcgcgccggattgctcgccgtatacaagacggtatgctggatattgcgatggccgagataatcctgaatcaggcgtgtatcaacgccctcttccgcaagcgcataaccgcaggcgtggcgcagcatatgcgggtgtaccggaacggcaatgccggcctgtacgccataatttcgcatcataacgtgaatatgctgtcgggaaagcggagtgccttttcgcgacaggaacagccagggaagatcggcgtttaaacagctcgtgcgcttaaccagccactggcttaacgccagctgttcacggggctgaagagggtgaacagttgaaaagccattttttaaacgccgaatggcgatccgctggctggataaatcaatatcgctcacttttaaaaaacgtaattcacttacgcgcagtccgtgaataaaacacatgaggagcatgcaataatcccgcagcgagccatcctgctgctgcgaagcatcaattaatgcttgcacctcttttttacttaaatattttcgttttttcatagccaacctgacggtttcttcaatggagcccctgagattcggctcctgtattgactctgctcatggctactggcaatccactgtcgagcaatccttgataactgcaagtcctgaacactgttaatagtcataaacgctaccgcccaatagtatcaaatatcaggaatagcccaaatatcacatcggtaaaattaaaaacaaatagatttagctgttatgtaaataaggaaatttataagcttatgctattaatatttatcttaagtctgatgaggcggcaagtttttttaagtctatgtgtagacttattgggggtttattcgccccctcagcgtcatcgataatgttttggctacagtttgctgttttttggaagttctattttttataaggaaatcatcagcatggaaacaatccctcgtgtacaacatgacacagacctgctccggaccatcaccaaacccatagacgacattgataaactcattcgctgcctggcgcctaaatgtaacaaaatgttaatgaatggtagacgaaacatcggcatagtaaaagaaaaccagcatcaatgcttggttttgttccgcggcacgatgtctttatatcgcaacaacgacggactcatcatcaactccgaaacgagtccattcatctttggcatgaatagtcagctacgttattcccggcatatttacctgcgcacccaggaaacatcttctattggcctgatatcaattaacgaggcgcataagatcatcgccgaacagcaattatgggaaaatgtctcacgtctcctggaatattcctcggcaaaagtctacgcccactgttttaaggtttctaaactttcctgttatgagatcattgttcatcagcttatagaattaaacaatgaaccagaagcgatcaaaaataaaatcaccgccgccaattatattctgtcgcgaacctttttgtcgcgcagtggggtcatgagaaccctggccaaattaaaacagctgggcgctattcagctccatcgaggcattctggtgaccatgaatcaactgcctcccagcctgaagcttagcgaataacgtctttagccgagcggccaccgcgatgtgggcgccggccgcattcagcctggttgactccgccattgccggtgggcagccccctgcccaccggcaaatgcgaaacgaggataatcagccgtgacgattcacgctaatatcgcgtagcgcggcggccatatccagctgggccagctctttcaagccttctcgcttgataaactggctccggtgcttgcttttaacctcttccaggcttttctttatctcgttcgccggcaatttataccagccgcgacgatgcttctcaccgccaatttccagccaaagctcagaatagctggtttttactctgtcgctttttacatggtattggctgtcgatcgcatagatctccttgatattgaaatgcgacaaaaaaccgtacagcagcgtgataattaagttcttcggtcggatgccgtaaagctccttggtcagcgctttcacttcttcattatcaatgtctttcccaccctggatgccgccaatccaggctcggccatcttcggtgcaggaaaaacagatactgtagacgcgtttatcacccaggaacattaagagcatcagctccccctcctcctgaaaaggcgatgccagcagcttcacatcaatgcaggtaccgtttttcagcgcaatagtgattagcgaacgaccaaatgctttcatatcgtacagctgcggcaacgcctcgggaagaaaggttttctctataaaattcaaagcgccatgagcaatattgagcttcgctctttttgacatctttttatttaaataggccttaaagggtttatcttcaaagttaaccagcccctcggttgctcccgttagttttgcacaagcgtaattttcacataacgtctgatattccttatattttcctccgattaaagatatttccctgcatttccgcaatacctttttatagttgagtttaacgtgacaaataaatttattagttttccgccattctttgatagcggctactgctgttgtcgagaccattgaccataatccatagatacatccataagccggtcaatattagcatattttatacaagtcaatgtctaacccagcgctcgttgtcgattcgtttaataaataatttgatcgcgactaaaataatcgccggcaggttatgaaacatgctttcaactattattattagtaggatcccgacccgcgctcgctcccgactgtatgcagtagcaaacccgcacttatcgctatgtgctacccgggttcacaccgggtgcatccccccggcgttttgcctatacttgctcacggtcaaaactgaacttaagtgggtaacgcatggaaattgatctcgataacctcgtctttagcgggctggaagaagcgcaagagcgcaacgctgaacgccttgaagaggcagataaaaaagcgcaggccgttgttgccgacgatgactgcggcgacgcctgtaagatctaacgacgaaaccggctaccctgccggttttttttacctgcctctcccccaggggatgcccgcggccagcgacatcaccgtggcaatcagaaagataaagccgatcgcgaaaccggatggaataacgccggaggtaatggaggcaatatactgcccggtgttcagttccgctgaaatatgccccatcaggaaagccaggatcatgattaaactaattttaactatgctggcttagccgatataaagttctttgaaaagttctcaacattcagaataccgcgcgcggaaccagataaaagagatttgcgtccttcaatcactattaaaatgtatatcagacaaggaagaaaattttgcctattttcactctattcagggaaaaaacgagaaaactgttctctacacgccaaaatcaataatcattaagcaattgatataaaataactttattttaaagggtgatgttaatcacaaaaggtagaggaaaaatcttctcctgcacgcttccgctggatctttttttcgtcctgccgctcacagcctgagccaccgctgcgaagaatgagttagagctattttctttagaatgctgtatggtcatacgctcttaaatcaggaaatatcatatgtcagaacgcaaagacgctaaaactcgccgtaattatctcgttaaatgctcctgccctaactgctcccaggattcagaacacagcttcagccgagtccaaaaaggtgcacaactcatttgtccctactgccataaactctttcagtcctcatcacgacccgctgcataattttctcttgccagatgccgattgccgcgcgtggctgagcaataatcagccagcgccgatctcttttggcgaaaaaaagcccgccagcgcgggttttattttgatttgaatagacttcccgcgcgcttactgtatagtcgtggcggttttcatatttaaaaggtatttcgttgttccaaaaaatgacaggtattgtcaaagcatttgataataaaacaggcaaaggcctgataatcccctcagatggtcgcaaagacgttcaggttcatatttccgcattatcgcccggcgaacccaccacaatcagcccgggaatccgcgttgaatttcgtcgcgttaacggactgcgagggccaaccgccgccaatgtctatctttcgtaaataccggctccaggcgctaccgagcggattaaaacatggccagaaaacgcttcaccgtgcgcgagcgctcgtagcgtcgccaggcgatagcaatatcggtttttagcggcgtgcccgacaaagggtgatagctgacgttaggtagcgtgatgcaggtcatggactgcggcaccagcgcaaagccgaatccggcctccaccatgcttaacgacgatgatatttgcgatgactgatacgttcgttgcatatcaataccggcgcgcagatagctgttatacaccagctcatacagccccggagccacttcccgcgggaaaagaatcggcgccacgtccgttaactgctccagcgtcagctcgctgtgggacgacagcggatgcgaacgcgccagcgcaatcaccatcggctcctggtcgataattcgcaggttgaacgctttactgctttcacagggcaggcgcacaaaagcgatatccagctccgcttcgccaagcgcccccatcagcgtcgccatattgccctcgacctgatgtaacgtgactcccgggtgactgtgctgaaactgctggagcaggctaaagatttgcggatgaaaggcatcagaactggtaatgcccagcgagagtcggccgttcaacccgcgggcgatccccttggtcttttccagcgccgcgtcgcttaatgccaggatctggcaggcatcctcatagaaagactcccccgcttccgtcagctcgacgccgcgggttaaacggcggaaaagcggcgtgccaatttcccgttcaagtctctgtatttgctggcttaatggcggctgggagatgccaagttcttttgccgctttagtgaagtgtcgcgcctcagcgacggcgacgaagtagcgcagataacgaagttccatatcgaaaacgtctcaaacaatcatagattctatattggaactgtgagctgaatcgcgtcaacatttatttaacctttctgatattcgttgaacgaggaagcgggtaatgaaccattctgctgaatgctcttgcgaagagagcctgtgtgaaactctacgaggattttccgcgcaacatcccgatagcgtcatctaccagacttctctgatgagcgcgctgttgagcggcgtttatgagggcaataccaccatcgccgatttgctcacccacggcgatttcggcctgggcacctttaatgaactggacggcgagctgatcgcgtttagcagcgaggtttaccagctgcgcgccgacggcagcgcccgcaaagcccgaatggaacagcgcacgcccttcgcggtgatgacctggtttcagccgcagtaccgcaaaacgtttgataaaccggtcagccgcgaacagctgcacgacattatcgaccggcaaatcccctccgataatctgttctgcgccctgcgtatcaacggccattttcgccacgcccatacccgcaccgtaccgcgccagacgccgccctaccgggcgatgaccgacgtgctcgacgaccagcccgttttccgcttcaaccagcgcgaaggggtgctggtggggtttcgcacgccgcagcatatgcagggcattaacgttgccggctaccacgaacacttcatcaccgatgaccgccagggcggcggccatctgctcgattatcagctcgaccacggcgtgctgacctttggtgagatccacaaattgatgattgaccttcctgccgatagcgccttcctgcaggcggatctgcatcctgacaatcttgatgccgccattcgctcagtcgaaaactaaggagattctcgtggataatcaacatcaaccgcgccagtgggcacacggcgccgaccttatcgtcagccagcttgaggcgcagggcgtacaacaggtgttcggcattccaggggccaaaatcgataaagtcttcgattcgctgctggactcctccattcgcattattccggtacgccacgaagccaacgccgcgtttatggccgccgcggttggccgcatcaccgggaaagcgggcgtcgcgctggtcacgtccggccccggctgctctaacctgattaccggcatggccaccgcaaacagcgaaggcgacccggtggtggcgctgggcggtgcggtaaaacgcgccgacaaggccaaacaggtgcaccagagtatggatacggtggcgatgtttagtccggtaaccaaatactcggtggaagtcaccgccgcggaagcgctggcggaagtggtttccaacgcgtttcgcgcagccgagcagggacgccccggcagcgccttcgtcagcctgccgcaggacgtggtcgacgggccggtccacgccagggttctgcccgccagcgatgcgccgcagaccggcgcggcgccggacgaagccattgagcgagtcgcgaagatgattgccagcgctaaaaatccgatattcctgctcggcctgatggccagccaggcggaaaacagcgcggcgctgcgtgaattgctgaaaaaaagccatatcccggttaccagcacctatcaggccgccggcgcggtgaatcaggaccactttacccgcttcgccgggcgggttgggctgttcaataaccaggcgggggatcgactcctgcatctcgccgacctggtcatctgcatcggctatagcccggtggagtacgaaccggccatgtggaataacggcaacgccacgctggtgcatatcgacgtactgccggcttacgaagagcgcaactataccccggacatcgagctggtcggcaatattgccgccaccctgaacaaactctctcagcgtatcgaccaccagctggtgctgtcgccgcaggccgccgagatcctggttgaccgccagcatcagcgggagctgctcgaccgccgcggcgcgcagctgaaccagtttgcccttcatccgctgcgcatcgttcgcgccatgcaggacatcgtcaacagcgacgtgacgctgaccgtcgatatggggagctttcatatttggatcgcccgctatctctacagcttccgcgcccgtcaggtcatgatttccaacggccagcagaccatgggggtggcgctgccgtgggcgattggcgcctggctggtcaatccgcagcgcaaagtggtttcggtttccggcgacggcggcttcctgcaatccagtatggagctggagaccgccgtacggctaaaagctaacgtcctgcatatcatctgggtcgataacggctacaacatggtggcgattcaggaagagaaaaaataccagcggctctccggcgttgagttcggtccggtggactttaaagcctacgccgaagccttcggcgccaaagggtttgcggttgagagcgctgccgcccttgagccgacgctgcgggcggcgatggacgtcgacggccccgccgtggtcgccatccccgttgattacagcgacaacccgctgctgatgggccagcttcatctcagtcaaatactttgagtcactacagaaggaatccagcaatgaaaaaagtcgcactcgtgaccggcgcgggccagggcatcgggaaagctatcgcccttcgcctggttaaagatggttttgccgtggctatcgccgattacaatgacgccaccgcacaggcggtcgccgatgaaattaaccgcggcggcggtcaggcgctggcggtgaaggtggatgtctctaaacgcgaccaggtttttgccgccgtagaacaggcgcggaagggcctgggcggttttgacgtgattgtgaacaacgccggggtggcgccctccacgcctatcgaagagattcgcgaggacgtgatcgataaagtctacaatatcaacgtcaaaggcgttatctggggtatccaggccgcggtagaggcgtttaaaaaagagggccacggcggcaaaatcatcaacgcctgctcccaggcgggccacgtgggtaacccggaactggcggtctatagctcaagtaagtttgccgtgcgcggcctgacgcaaaccgccgcccgcgatctggcgcatctgggaattaccgttaacggctactgcccggggatcgttaaaaccccaatgtgggtggaaatcgaccgtcaggtttccgaagcggcgggtaaaccgctgggctacgggacccaggagttcgccaaacgcattacccttggacggctttcagagccggaagacgtcgcggcctgcgtctcttatctcgccggtccggactccagctatatgaccggccaatcgctgctgatcgatggcggcatggtatttagctaataataaataagctctgacatggtttgccccggcttcagcgccggggcttttttatctcaccctttagggaagatccacaggtcgctgacgggcaaggccagatggcagcgcttggcatcgcgcagcgcgctgccgtaggcgcgaatggcgaaatcatcgccctcggtgcgaaacaggtactcccagcggtcgccgagatacatactggtcagcagcggcagtgccagcatattctcctcaggcgctgaggcgatgcgcaggcgttcaacgcggatcaccgccgtcgcctcttcccccaccttgaccccctccccgaccatcccccacagcgcccagctggcgccctcaattcgcgcccgaccattatccagagcggtgacggtgccatgcagccggttattgctgcccataaactcggcggcaaatagcgttctcgggctaccgtacatctcctgcggcgttccctgctgctcgatcaccccgttattgagcagcagaatgcgatcggaaatcgccatcgcctcgttctgatcgtgcgtgaccatcagcgccgacagccccagcttgacgatcagctcgcgcaaaaagacccgcgcctcttcccgcagcttggcgtcaaggttcgacagcggctcatccagcagaatcaccggcgggttgtaaaccagcgcccggccgatggccacgcgctgctgctgccctccggagagctggtgcggatggcgattgccaagatgccccagacccagctgttcaagcacggtctgcacccgctgcttgatctccgcggcggcaaccttacgcagcttcagcggatacgccacgttttcaaacaccgttttatgcggccacagcgcgtaggactgaaataccagccccaggttgcgcgcctccgccgggatttcgctacgcgggttgccgtcatagacgcgggttttaccaatagtgataatgccgctggtcggcttctccagcccggctaccgcccgcagcagcgtggtttttccgctgcccgatggcccgagcagcgagaccacctcaccccgcttcagttccattgacacgcccttgagcaccgggttatcaccgtaggtcagatgcaggttttctaccgataattcaatcatgtaatttcactccaaagcgcagggcgatacccaggcccacgaccaccagcagaatattaataaaggagagcgcggcaacgatatcgatagcccccgccgcccacagcgacaccagcatcgaaccgatggtttcggtgcccggagagagcagataaaccccggtggaatattcgcgctcgaagataagaaacatcagcagccaggagccgattaagccgtagcgcgacagcggaaccgtgacgtggcgggtgatctgcccgcgcgatgcgccggtactgcgtgcggcctcctccagctccggcgctacctgtagcagcgtcgaggagatgagccgcagcccgtaagccatccatacgacggtataggccagccagacgctaaaaatggtgtttcgcagcgcgcgcagctgaacgatcagatgttcacgcagccagtctgccaccggcagcgccgagagccagccgtttttcagcgactgatcgagccacatcggcagaaacagaaatacccacagaaacgccagcccggccagcagcccgggcaccgcacgcggcaccagcacgctatagtccagaaagcgcgtgacgttatccggtttgcggtgcatcgcgatgcccacgaacagatagcagaccaccgccagcgcgccgccaatcaccccaatcgccatagagttaacgatggcgcgcagcagattcggctgctgccagatgttacggaacgtcgccagcgagagttcatcccacagcgaaacgcccacgccccagtttgaaataaaggcccgcagcgccacgccgatcagcggcaccccaatggtgaccgtcagccatgccaccaccacaaccccggcgacccagcgccacttccccagcggcagcgcgcgggcctgggacgcttttcccttcatggtgacaaagcggttggcggtgcgcatcaggcggcgctggagcatcaccagcggaacggtgatgcagatcaggaccaccgccaccgccgccatcaggtgataagaaggcgtgccgagcttgttggtgagcttataaagataggtcgccagcaccatgttgccttccggatcgcccagcaccagcatcaggccaaatacctccaggccgaggaaaaacagcagtacgcaggcgtagagtatcgacggtcgcaccatcggcaggctcaccgaggtcatcacctgcagcggcgatgcgcccaccgtccgcgcggcctcctcgacatccgatccgacgctgcgcagcgcggaagagatatagagataggcatgcggaacgtgcgtcagcccggcaattaccacgatgctgaacatcgagtaaatattccacggcacgaagccgatcagctgctcggcccactgcgaaaagaagcccaccggcccggccgccaccacgtaaccaaagcccagtaccatcggcgaaacgaaaatcggtaccagaatcagcggctcgataaaccgccgcccgggcaaatcggtacgtaccattaaaaaggcgaggatcccgccgagggggatggcaatcgccaccagaccaaacgccagaataaagccggacttgagcgccagataaaaatccgggtcgctaaagatgaaagcgaaggcttcgaggctgaacgatttcgtgcgggcaaaaaaaggcgccgagagaaagctctgcaccacgataaataacagcgggacataaatcgccagcgccgtcatcacgacgacgataccgcgcggcaaaccctgccattttcgacgtaagacattcataagcgatccctttaaacctggcgggcgttaagcgggctgcgcatcctgaaatgatgcgcagcgccggagggttatttcgccgcggcggtacgccactgtttgataaattccagtcgttgtttcggctcaagatacgccagcagcgtttcatcgaccggaataggcttcagcgcgctgccaagcattttggtcataccgtcgatatcatttttaccttcgatatcattgcgcagggagggaatatcggcctggttcgccaggatgctttgtcccttttccgacagcacgtaatcaaaccacagcttcgcggcattaaggtgctcggcttctgcggtaataaaagagacccgcgagagcaccagtacataatctttcggataggagatgccgagcgaaggatcgtttttggcccgcgcctccgcgtaggatccgagaatattgtagccaatcaggttttccccggaggagacgcgctccatcatcgtaccggtggacgattgcacggtcaggccgcctttcgctatgcccgccagatcgtcaaagtagctggcatcggctttgctgtcctgtaccgccagcataaaacccagacctgatttttcaatgtcataagtcgtgaccttacctttgaatttatcggcctggccggcgatcagcttcgccaacgcggtatgcgagtccggtacttcaccctgagggatcagccgcttattgtagataaagaccaccggctcgtaggtcgtgccgtaggctttctgttgccagaccgcccattttggcagcttatcccgctccggcgaggcgtactcttcggcgtaatcggtggcgagcttcagcgccgtatccatggaagagctccagaccacgtcgccgctgccgccgcccgccgcctgttcgctgatatagcggttgtacaattcggtgctgttcatatcgttatattcaactttaatgccgggatattgcgcttcaaagcctttaattaacgggcctgcggccttggtatcggtcgttgaatagataaccactttgccttctttaatcccggcatccaccaccttttgataatccgccggatagccctgaggaactgcggcaaggacctgtccggagatagctgccgtcagtgaaatcactaagccactaattttcatatacataaaatcaacctttaggcatcaattattaaacgtaaatttaacatatagtggggcaccagagccttgcaacgccggggtttgtttttttacggcttttgtgacgctggcgtaatttaaaggaagattcgtggggcgcggctaaagagataaaggttgttgggcgggaatattaagaaaacattaatttttttgttttttaccccctcagtgttgcgttttcttgcacacaaaaataatacccgctggcgccgggcgaacgtcaatcgcgcttatggatattgccatcagggtaaattttgcgatcggccttacaattgagctgttaaataacgtaatggaaaggcatttcatcaaatgaactcgccattctcctgaatttaaaatggaaccaggcctatgtagccagaaagctatctccgctatgtccttgacgtcattgctggctggcgggattaccacttagcatttcatacagcgagggggtgttgtgtccctgtggcattagtcctccttcagcggctgtaatgcaaggtggttatttccggcttccagaacacggggtttatccggatcgagatcttcacgtctgagaacctgcttccaggtattgttgaccatatccggatggcggaacagtccggccaccgcgacaaactgcgcgccttcttccattggcatatcaagattcgcatccccacccggctttatcaccacgtcgcgggtcgccagcaggtcggctttcaggatcgtgtcgccgttcttgaggagttgctgataaaccgttttgtcgaagtttttgcggtctttcaactggtagacacgaaccaccaccggctcagacagtgagttactctcgcgggaatccgtattcagtgcttcacgggctataaaatccagatgcagcaccttaatcttcttataaaacaccgccgtatacaccgctttggtgccatccgtaatactctgcgtcaccccacagcctgccaggctgaacgccagtagtgcagatagccagcacgcgggtttaatcaaatttgtacttagcacgtcgatttccttgttgtggtttcgcaggcgccagcccggtgtagtaacccagttctgtcgtaaaggtcagcgggagatcgtccgcaaacgccccctcctccgctcccagcacgccgttcatgccgagccagaaaggttcttcgccgagcggcgggacggccagcagtcgggtccgggtggtcagggtgatcctggccttaaaacgccagccgagataaacacgcagcatcaccagaaaatcctgatacagcagaccatccggtttccagccctgcgcttcctgttcgttatccgtcctgagcgcaaccagcagttgactgcccgcatccatcgcttcttcccccagcggcgtattgccgtccagcagaaaatcgtcatcgccgtaaaaacccagcggctggccgatctccaccggccgcaggcagtacggactcacctgcaccgtagtatccggggccagcagtctcaccagcgcctgcatcccctcctgggttttgccgggttggcgcagcacaccgagcagcgccagaaagcgggataccggtgtggcgatgtggtttgcggttcccggtatgcccagccccaccagacccagcagcgactgcgaaatgctgtcagttccccctgcctcaaacgtggccggataagagtatttccgccagatgcggtaaaactgcgtcaggatgcggtggctgaagatatccagaaagccctgtagcacctcatgcccttcacggcactgagtgatgtcatcaagataggctgtcggcaggggtgagtcgacaccgtacatccccataaaggttgtgcggatgagcggtggcctgctgtcatcatcctcgtcatattcgacagctttcagttcgctgcccggaaaccccatccccggatgcggcgcaaaccgcaccgggtcatcagcagggtggctggttgaccccatcagcggcctgtccggattacgcttctccagaagctggcagaagcgataaaaattcatgcggtgcaggtcggctgccagccgcgggctcagccgggaatgcggcggttgtgcttctcttcccattccaggcgctctccggtcggttgcagaataataatcaggcggttaaacagatagatgtcggtgtagagcgcgaagaagcggctcagcatctcgccgaacaggcagatgtcgccgcgcccggcaaagccgtggctgtcgagcgtcacctcaatctgcacgccgcgtaccaggtagccctgctcaaatcgcccggtctcactgtgcttcacgtcaataatggcttccaggcgacggcggttcatctcgctgtcggtccattcatacagcgccagggtgccgcgcagcacgtcggcattatccatcatcgacagaaacccgctgccgaggtggctcagcacgcgccagtgaaaacggtcctgtgccgggggatagcagggcagcgtcggcgcacacaggttacgcacggcgacgctggccgaggtgcttttcatcaccgtatccagcacggtgctttgtaatgcgcgtcgcggcagctggccattggtaccggtgagcgtgagggacaggctttcgttttccggcaccgtgtgattatcaaaggcttcgccgccgaggataagccacgtgttatacagtcctgacggaccacggcgcacgcgggtgtggtagtaatactccggcgcttcatggcgcatcatgccgcctttgtggcggaaactggagaacggtacataggtatactggcttgaggatatcaccgaatcgacagcataaatctcggtatggccatcctgcacgcgcatcgggcgcagcatgtattcggtctgcagtgaattcagcgtcagcgggtcagattccagcggaaacaggttaatcaccggcacacagttcaggcgcagatgtttttcggtaaagctgaagtcatgctcccagcgctcggccagcaccacgtcgatttcgaaccacgcgagctcagccggaaagactacggtctccagcccgcgcagagccgtgaacatgaatttttcgcggaaggtgaagtactccagcagcaactggtagccgctaaagctgctgctgtccttcggccacagcccgtcatcatcaccgaatcccagcgcggtgaaatacccgtcgagtgactttctgtccgtgtcacccggcatccgcagccagagacgcgccgtgttcatggtaaaggcttcatgcatggcgcaggccagcggtgcatcagcattgaagtagaacgggatctggctgagatcggcacgactccagtcggcgagatggctgcagttaaagcgcaggttgatgaccgaacgcccgtcagggtcagtcgacagacgggcatgctccagcgacaatggctgaagggagatttctttggtggtggtgtaccggcagcgcgtgcccttctcgccgatcggctgcgaattgacctcgaagcctttgacgatacgcatcttctctttcatctcgcgccagtcgggcgtgaactccaccaccgacatcgacggaatggtgcgcaggtattgcggccacagcaggctgaccagcccttcggtcagttccggcaggtcgtcatcgagtttctcgcgaagacgacccatcaggaaagcaaagccctcaaacaggcgctccacgtacgggtctcgcgcacccgctttatcgagattgagcattgccgcctgctcggggtgagcgcgggcaaattcttcgccggcttccagcagatagcgcatttcagcgtcgtagtaacgcagggttaagtcgtccatatttatttttgctttgtttccgttggattcagagcacagctgcgccctgtagtatcttcagcataaggagaaaacacataacgatggcagatgctgtcgttagccaccataagtacgttgatgccgggaagggataaattttgcgccgcaggggcaactgctggtgctatgtagcgaaccagcatatttccgcccactggcattattgttcggaatatgtcccactattttgtacgtgccggcatgttttccgcaggtcacattctcctgctcccgggctacagggatccccatgacggtatcggtcggatcacctccaagaatttttccaccacaagtggtcatgtcaccctttaccagataataacctttcgccatttttcacatcctgagttcatcaaccattcaaccgcaaagcaccgcactgcctgccgcagtccggccagaagctggtccatctctggctgtaaccacgttttatcggtttcactacgtgcggctttcacgcgcagcagtctgaggaggcgcgatttcacttcaaacagcagtgccggcacccactgcgtgagggttagcgccacgcgaaaagatacggtcgcctgctccggtatttccagccaactctattgcaggtacagacgtttgaggatgcccgctgatcagcccgcggcgtatgccggagagtttattgacctcctcccggatgagctgggaatcatcgtcatatcccggcacctctcccctcggacgggtagcgctgaccggggcaagccagggctgccagctttccgtgcgtgcctgcgcctgctgtcgcagcagattttcattctgcctgacaggcagtaaccagatcctgcagagtgtccatcattcagttccgtccatatcactgtcttccgttttggtcatcagcgcctgagccgtagccgcgctgtcgacgctgaatatctgatccggcaacgtgaagccgcgtaattccagcagcgccagcggaccttttccgagctgtgagcgcagcacccactgcagggtgcggccatccggtgcggtgaaactcatcatccactggctgcggtcaagctgctgacgcttacccaggttaagccagcgaataaagccccaggtcccgctgtaatcaccaaacagacgcgcaccggcattaacggtggtccaggtcagcatggttcccggcttgtaagtgtcgccaggccagcgaatggactgccagtcagccatctggttaaagtagtgcagcttttgcccatcaatggtcaactgcgtttccaccacctgcggcacagggcgcgcctgcagctcaaagctgatgccctgactgccatcggtaaacagaatgtccgacagctggctcagctgattaatggcccgcaggaaggccgggttgaagctcagcccctgactgttgaccttatccggcacccactggctgccctccttgtgcagcacaccgctgagctccgtcgtcaggaagcgctcaatgcgcccgctgtccttgcgcacaaactccgccagcatcggcagggaggcatcacttttgctggcggcaaacgggaaacgaccgtcaaaggcagtttgccagttcgcgacaaccgagcggctccatttatcattcaggctggctgccgacggctgaagcactgtctcccaggcctgagtcagcggctgcacaaacattgtgctgccaaaaccgctccactcctcgccaaggcttgccgaaatcaggctgccgtactgccaggtgtcggtgaggtccacgcttttgccctggaatacggtctgcgccagggtctgcatcatcgcctgcgggtcagaagcgctggccacctgttgcaggcgcagacgcacgcgggtgatacgggtcaggtaagtctgcaggctcagcgtgttatccgccgacatcacgttgctgcctttgtttttgcccagcagctgaagcagcggaccaaaggtttcatccagcggcccctgcgggcctgatgcagactggtcaatcaccggtttgtcttttccgccgaccaggtctttggccgatttgatgatggaatccgaaaggccttcgctttgctggccggtctgtccctgccaggcgagcgtattcatcagggcaatcagcggcgactggcggacgtcactcatcagcgtcagctggtcggtaacgtctgcaatattgttcgccggattaagctgcaggctgttgaggaagctcagccagctgccggcaaagtcagtgaagtaacgctgtgtcagacgcgctttcagggcttccggcgacaggtctgaggagacggcttttcggctgtcgctgagcacccagtcgatttcatcccggcgggaattcgccgccttttcgatggcctgctgaatccccccatcccaggcctggcgggtaaacattcccggcaccacctcctcggtggtaaacagtcgccgcgcatcggtaccgccagtcatgtcctccagagacacatcggcaaagttacgacgcacggatttgagcatgttctcatacagcgtgctttccgcgttgcgccgtcctatctgctgcagcaggacctggcggctctggctgatcagctgcgcatccggcgtgattacccactttggctgcgcaggcagttcggaaatgtaaaaagcccacaaatccggcgccaggctctgccacagaccggctgagatacctgtccgcgtcggctgcacggttttcatggtctgtgcgtagaatgcgccgtcggctttatccggccgggccatcatcagccaggccttcagctggtcgtagcccggtttcgccagctgcgcccgctggtcgctgttgggggcagaatttgccagcgcgctgagcttctgcttaagcgcctcatttgccgggtcgcgtatcaggcggttgttcgccacgccgtaccagggcagcaacgcgtcaagcagctgctgattatggtccagtccgaagcgctggtaccagggggcgccctcctgagcattatgctgcagacgcccggcatcattacgcagagtatgcagggccgtcagctggttgtccgatacggaaggatgcgccaccagggcatgagcctgttcggcgacggagactatctgctgacggttgaccgtaaacgacagcagcattcccgccccccagacaacgatgatggtcatcagtgtccaggcaagcgtcctctcccacgccatgccgacacggcggccccgcacacgggtgcagtcgtcaacgataccctgccaggtcgccggcagggtcagggcatggcgctgtaattcagggatatattgctcagcatcggctgttcccgctgacgtactggcggatttattctccggcaggctgaacatcaggccacgcagcggaatacgctgctgagagtcgtagagccatggcagcagttgctgagcccggcggacgataccgccgtcctggaggtgctggcccagacgcagcaggaagtcgtggctgttgttctcagcgacctggcttaccccctgcgcccgcagggccgggagcatccgctccagctggcggataatatcgtcttcttttgcgcgtaggggaaaacttgcccccacagcctgctcaggacgcataccctgcgaccagttgctgtcgcacagctgccacagccagaccggggcggaataacgcagcagttcgctgattttttccagcccgcgtaaatcgctgtcgctgatttgcggggccaggttaagtgactgcggcatgacgcggacaatcccgtccagcgggcgtccgcggcgcagcttgcgtaatgcggtgtatttttcacggtcaggctccggtgccaggctgccaccgtaaatcagcacggtgcggttgccttcgagccactgctgctgttgcaggccgggaaccagctgttcgatagcagcttcatcgccggtgatcagcagcagacggactttgcgacgccagaaaagatggtagcgacgacgaaggtggttgagaatttgttgacgggtcgtcactgcagcagatactggtgttacatctttctttggtggcgtcttaacatcatcaccctgcgcattttgccgctctttactgaagctacgtttaccttcagctcgcgcaccaaagaaaagaaatactccagttatggccagtgcaatacttgctgccacagaaccgctcaaccaggcataccaggcggaggtttccctgatgagctgtagcctttcaggcagccagtagacgatactcaccacggcaaggctgcaaaccagcacaattaacaccaaaagccagaacacaatttccggttttttaaatagcgagaggaatcgcctcatgcttcgccctccttagcggaagacgcaggggatacaaccatattccagacctttccagtttgttgatcgcggctaatcagtaagtgatgtgccggttgttgttgtattgattgtgtggcacctgccacggcaagccagagtgatgcgttaccaggatcacccagaaaatcattgaaattatgaaaacccatctgcgggtcgacatttttcagacctgtagtactaatgcctttcatcaaagcggcatgcgcttcggtttcagcatcaaccccactaagccaaagatgctccggcttttcgacgccaaccggcacccaatcgagcgcctgagtaatggcatagtgcaatgcgtcaggctctccttctccggcttccgggcggtgaagaaaggccaacggcggaaggatgtcctgcgtcagtcggttccccagcagtattccgcttatagcttcagcggacattgaggtattgagcggtgcgtattgccacgacaccaccagaaggacagcctcgctgcggatatgatggtcgagccagtgatcaatcgcctgcgcaccgctcccggcaagggtagaaacagattgctgaatacctgactgccgcaatgcgtccccaaaaagggcgaaggcttcctcctcagatatagacgaggagtgctccagaagcatcattacgggcttgtctgctggcaggaaagacagcggctgcgccagtttgcggattagtgccctgaataacgcctgaagatgctgctcttctttggctcccccggtacgggctatctgactcagacgggtatcttcctccccgcgccaggattgctggggataaaagacattctcatttttcacgagattgctgccaatggccgtgaacggtttattcgcagaggagtgtgccgtgcagcattcggccgccagaatttgcagcgcacgtctgccccggcgaacttctttgaggatcgtctgttcccgctccctgtcccgggcattggcggaaattgcacgcagcagataaatcacgaacaaaataaacagcaacccaccaagcataatcgcgggagcgcccacggtcagcaacacgttatttttgcccgtcaccagacgggaaatgacgatacaaaatccaatcaggatcatcagcatcatcatccagagagcaaatttgggggatgcaggcctggcgctgacatcaggcatattttttagatcgacaggcatagtacgattcttgttttgaaataacggcaatggatagcaggctggctgcattctatgagcaaactcaccagatgcctgccagggggttattttacagagtcagttaatattttttggtgtgaaacggatggttgtttgccatcaggagcggtggtggattcccactcccactcttccggccatttatctgcttttcgtggacgccagctgtcgggtctgcctttatttttgggctctgcgggtactggctcgcctttcatatacagacagaggaaactccagacttgctgtaactctgcgggttctccgtctgcaagctgaaaacgatggatgacattatacgttcccggttcgcagaccgagccccatagctgatggcccgaacggtagcgatcgctgcaataccggatttcaccgtgaacatcagcccagttatatcgggtgataatgaccggccatttcatccaggggataggatcaatgcgcttatatttataaacaaaaatcctttgcctcattttatttaaacgaacaggttgttctcgaggcataataaaataaatcttaatacaacttagaaacatacttaaaaaaaagacaaaccccgccagagcgataaaatatggaataaagtccctaccatcactctgtatttgtgttgatatcgtatcgattaatatataaaaaatgatacccaacactccgccccctaatggaatcattccccaccaagtcatccctttgtcataacgggggatttcaagatacacatcatttatcttattcatccagataagccgcggaggcaccagttgcggctcacggctttccggcatatccgctttccaggcactgacgggagggttaagtttcggtttagcgcgagcaaacaaattgtcggtcatttccctgtccttgttgactgtccataatatcacttattccggcagcgtttcacggaaccgaataacaggagtgctaccatctggtgcggtggtggattcccgctcccactcttccggccatttatctgcttttcgtggacgccagctgtcgggtctgcctttatttttcggctctgcgggcactggctcgcctttcatatacaggcagaggaaactccagacttgctgtaactctgcgggctctccgtctgcaagctgaaaccgatggatgacattatacgttcccggttcgcagaccgagccccatagctgatggcccgaacggtagcgatcgctgcaataccggatttcaccatgaacatcagcccagttatatcgggtgataatgaccggccatttaaaccaggggatacggtcttttttgtatttatatacgtaaattttacggcgaccgcgatttaagcgaactggctgatctcgtggcgttataaatgcaattttcaaacaaaataaaatcattgttgaaaaaaaagtgatacttagcattatcaatccaggcattgcgtaaccatctatatattcagatatctgcacgcaaactaatataacaaaaaccattattccaaaagtgaataatgctgatggaatcattccccaccatgtcatccctttgtcataacgggggatctcaagatacacatcatttatcttattcatccagagcaactgaggtggtaccagctgtggctcactgttttccggcatatccgctttccaggcactgacgggagggttaagcttcggtttagcgcgagcaaacaaattgtcggtcattttcctgtccttgttgactgtccataatatcacttattccggcagcgtttcacggaaccgaataacaggagtgctgccatctggtgcggtggtggattcccgctcccactcttccggccatttatctgcttttcgtggacgccagctgtcgggcctgcctttatttttgggctctgcgggcactggctcgcctttcatatacagacagaggaaactccagacttgctgtaactctgcgggctctccgtctgcaagctgaaaacgatggatgacattatacgttcccggttcgcagaccgagccccatagctgatggcccgaacggtagcgatcgctgcagtaccggatttcaccatgaacatcagcccagttatatcgggtgataatgaccggccatttaaaccaggggatacggtcttttttgtatttatatacgtaaattttacatcggctatgatttaaacgaactggctgatctcggggagttgtaaaatatattttcatacagaagaatgacaacgtaataaaaacactagtactaagcaatgcaattgcgggcattgtaaaaccctcaacataaggttgcatctttagacaaatcattaacataaaagacattaaacacagcattaatattcctgctggtaacatcccccaccaggtcatccctttgtcataacgggggatctcaagatacacatcatttatcttattcatccagagcaactgaggtggcaccagctgtggctcactgttttccggcatatccgctttccaggcactgacgggagggttaagcttcggtttagcgcgagcaaacaaattgtcggtcattttcctgtccttgttgactgtccataatatcacttattccggcagcgtttcacgggaccaaataacaggagtgcgaccatctggtgcggtggtggattcccgttcccattcttccggccatttatctgcttttcgtggacgccagctgtcgggcctgcctttatttttgggctctgcgggcactggctcgcctttcatatacaggcagaggaaactccagacttgctgtaactctgcgggctctccgtctgcaagctgaaaacgatggatgacattatacgttcctggttcgcagatcgagccccatagctgatggcccgaacggtagcgatcgctgcaataccgaatttcaccgtgaacatcagcccagttatatcgggttataatgaccggccatttaaaccagggaatacgatcttttttatatttaaagacataaatattttgtcgtctgcagttcagacgaattggctgatcgcgaggtgtaacgaatgcaattttcaaacaaaaaaatgccaatgtcgataaaaccacaacgctcaatattgccaagcaaggtattgcgtagccatctacgtattgcagcatcaaagcacacatagttaacataaaccctaaaaacaaaagcactactaatgctaatgggaacatgccccaccaggtcatccctttgtcataacgggggatttcaagatacacatcatttatcttattcatccagataacccgcggaggcaccagttgtggctcacggctttccggcatatccgctttccaggcactgacgggaggattaagcttcggtttagcgcgagcaaacaaattgtcggtcatttccctgtccttgttgactgtccaaaatatcacttattccggcagcgtttcacggaaccgaataacaggagtgcgaccatctggtgcggtagtggattcccgctcccactcttccggccatttgtctgcttttcgtggacgccagctgtcgggcctgcctttatttttgggctctgcgggcactggctcgcctttcatatacaggcagaggaaactccagacttgctgtaactctgcgggctctccgtctgcaagctgaaaacgatggatgacattatacgttcctggttcgcagatcgagccccatagctgatggcccgaacggtagcgatcgctgcaataccggatttcaccgtgaacatcagcccagttatatcgggttataatgacaggccatttaaaccacggaatacgatcttttttacatttaaaaacataaacattttgtctttttttgttgaaacggacgggttggtcccgaggagttacaaaatacaacttcatgcaaaacaaaaagcaatgtaaaaaaaacataaaacttaacaaaacaacaaggagtaatatattcccactgagatgccaggatattttcattatgacaatgctataaagcgagtagatggtaaaaccaagcattaatactgcagaaggaatcattccccaccaggtcatccctttatcgtaacgaggaatttccagccaggtgtcatttattttatttagccagagcaactgcggaggtactaactgtggttgattattctccggcaggtcctccttccaggcactgacgggaggattaagcttcggttttgcacgctcaaaaaaattatcagtcatactccagtcccttattggctgtccatggtggctgaaagttgcaaaatttcttctggatacgttttgtctggccagtaactgactttcagctccatgcccgtgaagcgccgggtatttagtgggtattctccactcagctgcagtattttactggtacccgccgtgactagcgtttcatccagtgcaggcgcagaggtcattttaatggcaggtggaacgactaccgcattcatgctcatgatatgagtcaattcaacagcctgaggcactggtttggccaggcctgcaagctttgtcggggaaccgttacgcgccagcacctcacgcccaccactcccaatggcagctaactcaaccagccagtctgaaccggactggctataatcgggaagggtcgccagaacggacaccatctcggttcccgatatcgtggaattgaacaagaactcagtgatccggtcgcgaaccagctgcgctgaaacaccgctggcaatggtatgtaattctttcatcgcttcctgcaaatcactcaggctggcggcactccaggctttctctttaccgccgcgcttttcaaccacgccaaaacaggtatgggtcaaccagcgctccagcggcgagcgaacattgctgtcagcagcggatgtcaaaatcagtgccactattcctagagcaatgcaccatcctataggtcctaaaattaatgtttcactgaaaagtgcaaaattgccaacaacacctgcatagatacccaaaccacctgctgtcaatgttacatatccggcagctagatattgatttcctgctttagaatcccctaaattcttaacatcatgattcttcataattaatgatataccatcaataaccaccgccacgccaccgatcactccagccactttcagcattgggtgcaccatctctttgctcgcctggaacatcgtataggtctgcccgacgatttctgccccagtcgccatcattaaaagcgttcccgagccaagcgacattacagattgtgagtcaggtagccaggttttcagcgatttcatattctcgtgcatggtatggatctgaaaaccaagcatgactccggctagcaccagtcccaggctgcctgcataaaaactcggcggcagttcagactgaaagcctgcgactctgcgcatatctgcggcgcttaaaggaatttcccctgttgtcagagagtggctgactatctctggtgtcaggtccggcagtcctgccaactgagatggatttttaagcaagttccccgattttatcgccgacgcgctcgtccccgccttgcgtgctgcctgcttaaacatcaacgagtcaaccgttttcaaaggagccgccagtttgacctgaattttacggtccaggattaccgggtcggtgatttcaggccagtgaccagcccgggaagtactgatgatactgtcagcattttcaagacgttgagtcagaactgattgtccgtgggtatttaatggcttacgcacgacattctgataatccctgacggtcatttctccggaataaaccgccaccacaggcccttcacctgctgcacaggccagggccgacattgtccggacaaacccggcttccgctttcgctgaaagcacgttgctcagttgactgaacgccccattcagcgacatcaccaggcttgctgttgtttgcctgaaggcgtcgctgttaaggaaatgccccatctcgtcgctattgagcagcgttttaagattggcgtaagtcatcgtcccgtcatagaccgacgtcggcagatcttttctgccggctagcaaagccctgtaaggtggacttttcgggtcctgcatccatgaaagccagacggttttaccgccatcagtcgctttatcacttttgtccatccctaccatgccaccgtggagattaccggctagcatgcccagaagtgcagcccaactgataacactggtctctggcgcataatcatgctcgatcacggtatgccaaaaaaccgactgataagccgcacttaaatcctgtacgacagatttcagcttccgctggtagccatctaccgttgactgataacccgaggcaaattcagcgcgaattgactcatggtaatagtcctccagtcgctccatcgcatcctgggttttcatggatacccgtttggcacggctgatgggatattttccgggaatcgctcggatggtgggatctgtagctattttttccgctattccggcccgaatttgtataatggcatctgatatcatcttcttatgccgattttcagtcttagcctgatagtcggtcattaccttaacgacatccattctggcactgttcaattcctgaaccatcccgatggcatcatccagcacaatggcatgcaccacaccgtactgctcctgtaactccgcaaccttattacccagcgccgtctgcttcctgatatcccttcgcggataaaaaccatacgcgccaccgggccgcccttcttttccgacaatactcgggaatttttctgtcgcaaactccagcacgttctttgtcagagctgagagcgtggggtcaagcgtcaggctgcgccccgcaccttcaattgtcgctgttttcccgtcagcaatagtcacttgcgtaaaacgcggtgcccgggctccggcttgtttatatttcgccagcacttcccggggccacgggtcattgctgaaggccacggctgcatgggtatgcttcggatcgatattgataaagctgctgcggatatcatgattctgctgcaggcaggcggcactcagaggctccactttccctccttccggcatttcgttcgcattgaacatgcgcaaaaagccctgcggggtgacctggtaggcataccagacctgtttatctgccagaacatacacatagccctcgcgcagtgttcgcagggcgtatttgaactcgccccccttcagccccacatcctggtgaggaacggcaggatgccagccggtattcaccagagaagccgggactgcagccacacgtagcgggtatatcgcaacccccttacgctcacacgacttacagcctgaaggtgtggatgctgcctgctgacttgccgctgcatttttatttacctgtgctctcatatccatttgtttatttcctgcggtcattcagaaagccagcagagcgctgtcagtcagggaagaactttttctacagcggtggttgattcaatttccagtgcttgaggccatttatctgctttacgcgggcaccagaaatcagggcgacctttatttactgcctcatccggcacaggttcacctttcatatacaggcacagatagctccagagctgctgcaactgagcaggagagccactggcaatctggaagcgctccaccacattcagcgttccgggctgacagacggaagcaaacagctgaaaacctccggtatagcggtcgctggaaaaacgcatctcaccgtgaatatctgcccagcggtaagctttgatggtcgtcggccatctggcccagggattccaccattttcttttatagtcaaaggtgtagattttctggcattttctgttcagacgaataggctgatctctaggaataacaaaatataatttatagaataatataatcgatgttattaacataatattataggatgccaaaataaccagcaaagtataatcaaaatcatcaagcagcattgaaagggattcagtaaatataaatataaatataaatataaatataaatataaacatcataaacaacgcccctccccacatcacaccttcataacgaggaatttccatccagatagtattttttgtatttaaccaaatcagctggggaggcaccagctgaggctggttgttctccggcatatcctcctgccagcgatatatgggaggattaagccttggctgagtttcactctggccctgaaaaactgtgtcctgagacattatcttgtccttagcactggcgattaaccgtcttatcagatagttcgctacaggcgcggggaggtgaaagttcactgtccggcgcagtggtggattcacattccatttctgcaggccatttatccgctttacgcggacaccagaaatcagggcggcctttattcaccgcctcatccggcaccgactcaccttgcatatacaggcacagatagctccagagctgctgcagctgagcaggagagccactggcaatctggaagcgttccaccacgttcagcgttcctggctgacagacggaagcaaacagctgaaaacctccggtatagcggtcgctggaaaaacgcatctcgccgtgaatatcagcccagtgataggctttgacagtggctggccatctggcccagggattccaccattttcttttataatcgaaggtgtagatttttcttcttttctggtttaggcgaataggttgatctctcgcagcccagaagtatgattttaaaaaaacaaataaggacgaaatcaatacaaagaacatacctgaacagttaattactgcgaacatatccggaaaatcgccaagaatagagtaaaaaaaaggggttacaaaaatgatgaaaagaaacacaataaatgcgcctcccaacatcccccaccatatgacaccttcataacgaggaatttccatccagatagtatttttagtatttaaccaaatcagctggggaggcaccagctgaggctggttattctccggcatatcctcctgccagcgatatataggaggattaagctttggctgagtttcactctgaccctgaaaaactgcgtcctgagacattatcttgtccttagcactggcgattaactcgtcttgtcagatagttcgctacaggcgcggagagcagaaagttccctgtccggcgcagtagtggattcacgttccatttctgcaggccatttatccgctttacgcgggcaccagaaatcagggcggcctttattcaccgcctcatccggcacgggctcgtctttcatatacaggcacagatagctccagagctgctgcagcagagcaggagtgccactggcaatctggaagcgttccaccacgttcagcgttcctggctggcagaaagatgcaaacagctgaaaacctcctgtataacggtcgctggaaaaacgcatctcaccgtgaatatctgcccagtgataggatttgacagtggctggccatctggcccagggattccaccattttcttttataatcgaaggtatagattttttggcgcttactattcaaacgaataggttgatctctcgcagcaaaaaaataacatttaaaaaacatcaccgtaagagatataagtataaaatcaccaataatggatgtggtaataatatttatatcctgttcaagcccaagcatagacagagtcaacaaaaaataaaacaataaaaccaacaaagacaatatagcgccaaatagcatccctccccagacaaccccttcataacgaggaatttccatccagatactatttttaatatttaaccaaatcagctggggaggcaccagctgaggctggtttttgtccggcatatcctcctgccagcggtatatgggagggttaagccttggccgagcctcgctctggccctgaaaaattgcgtcctgagacattatcttgtccttagcactggcgattaactcgtcttatcagatagttcgctacaggcgcggagagcagaaagttcactgtccggcgcagtagtggattcacgttccatttctgcaggccatttatccgctttacgcggacaccagaaatcagggcggcctttattcaccgcctcatccggcacgggctcacctttcatatacaggcacagatagctccagagctgctgcagctgagcaggcgagccgctggcaatctggaagcgttccgtcacgttcagcgttcctggctgacagacggaagcaaacagctgaaaacccccggtatagcggtcgctggaaaaccgcatctcgccgtgaatatcgggccagtgataggctttgacagtggctggccatctggcccagggattccaccattttcttttataattgaaagtataaatcgcctgtcgttgcttgttcagtcgtataggctgatctcggggttcaaaaaaataaatttttaaaaacatggacatcagcgtaatgagaaagaaatcaccaaaagcataaataattaaaattccctccccattaagctcctgctcaattaaccatcctagaaccgtcatgaaaacaataatagccaatgtcataatggcacccaaaatcatccccccccagacaaccccttcgtagcgtggaacttccatccagatactatttttcgtatttaaccaaatcagctgaggaggcaccagctgaggctggtttttgtccggcatatcctcctgccagcgatatatgggagggttaagccttggctgagtttcactctggccctgaaataatgcgtcctgtgacatcattttatccttaattgccttaagtgctggtgattagctgcagattttcttccggcttgagcttatctggccagtaggtcactttaagctccgcatcgctgaatttcatgcggttaaacgcaaactccccctgcagcagtagcccgcttgtttcccagctttctttcattactgaatcagcagacaaggtggccgatcccattcccatcagcgtgatatcaaaactctgcttagccgcggttttcacgttattcaccttccctgaagacgccgactgcgccagtaactggctgcccccgcggcctttgaccgtcagttcgatcagccagtccgagcccatcttactgcaccccggcaacttcacctgcaccgccaccagtcccgtctcggcagtattgagcaccacttcggccattctttcacgccggatttgtgcagaaacgccactggcaatggtgtagtacgctttcatcgcggcctgaagatccgtaagactgttagcatcccagtgtttttcatttttaccacgagcctcttcgatcccaaaacagcagtcactcaaccatacttccagcggtgagcgcacttcatctgcggccatcgttgccagtatggctcctaaaatcgccagcccaatgcaaatgccaattgggccgaacaaagcgaaatctccggcaataccagcatatattccaacaattccacttagcgttgtaaaaaaactagagccaaaataaagatttctagcagctatatcaccatttgcctcagctttattggcattcatccacatcccaatcccatccacgatcgacgccacgcccccaatcaccccggcaacccggatcagcggatgggcgtagatttcagcgccacgcactattatgttgggcttgacgtcccaggggttggtgccccagcgagcgatcatatgaccaaaaccgaccatttccaccgccgatgccgtcaccatcagcgcgctggaggccagcttcatttccgcctgcgcatcccccggcacagcctccttcagcgctttaaggttggcgtccagggcacttttctgcagacccagcatagtggcccccagcaccagacccaggccgctgctgctgaatacccgtcgcggaagctggtactgctgacgagctattttcagcgtatcccccagcgtcatactcatgctacccgttgtaagagaagcgtctacggcatcctgcgcgaggatcagattcgggaatccggaaagatggctaccgtctttcagcatcgtgcctttactcagggccgccgaactggaacccgccttgcgtgctgcctgcttatagaccggtgattcaatatctttcagtaaggatgcatagcgtacgtgaatttttcgctcaagtatgacgggatcagttacctgcagccaggtaccggcatgggaggtcgtgatgcctccccgcatggtcccccaaacgggacgaccgtgcccatccagctgcttaagcatgatattctgaaattcacgaacggtgatttcacccgaaaaaatagtaacagcaggttcaccttctgcagcataggccattgcctgaagtacccgcccgaatcctgcgttcgctttggcggaaatcttctcgccaatcatgctgaatgcgccgttcatcgacatcgtcaggctgcttacgggctggctgaagttgatgctgtccacaaagtcacagacttcctgactgttcagcagggtcttcatattggtgtagtttgctgaaccgttgtagaccgccgcgattagcccagactgtttgccaaggagagacaaaaatggcggactgtccggactttccatccagtcatgccaggccgatttgtccttatccattcctgccatcgccccctgcaaactggcggccagcatgttaagctgagccgcccagctgattacactggttaccggggaatagtcctgtttgatcaccgtcagccataaagccgagtgataccaggcatccagatccttcgccaccgccgttattttttgctgatagccgtccaccacggctttaaattcccgggcaaatttagcgcgactgggttcgctgtaatattcctgcatcctctccagcgcagaacgtttggtggcggcaaccatatcttcacggctgaaggttattccctgatcgaagggggaatcagtaaaaggcgggatagtgacaggcttaatgcttttatccgcatccacctgctttgtcatcagttcctgaattgacaaaatcgtgtcggaaatggtgccctgatgaagattcgcgggtttagaacgatatttcgccagcgcatccaccacatccaggcgggcgtgattaagttcctgaacaatcccgatggcatcatccagcacaatggcatgcactgcaccgtacagctcctgtaactccgcaaccttattacccagcgccgtctgcttcctgatatcccttcggggataaaaaccatacgcgccatcgggctgcccttcttttccgacaatacccggaaatttttctgtcgcaaactccagcacgttctttgtcagagttgagagcgtggggtcaagctccaggctgcgccccgcaccttcaattgtcactgttttcccatcagcaatagtcacttgcgtaaaacgcggtgccgaagcaccggcttgtttatatttcgccagcacttcacggggccacgggtcattgctgaaggccacggctgcatgagtatgcttcggatcgatattgataaagctgctgcggatatcatgattctgctgcaggcaggcggcactcagaggttccactttccctccttccggcatttccttcgcattgaacatgcgcaaaaagccctgcggggtgacctggtaggcataccagacctgtttatcagccagaacatacacataaccctcgcgcagtgtacgcagggcgtatttgaactcgccccccttaagctctatgtcctggtgagggacggcaggatgccagccggtatttaccagagaagccgggactgcagccacacgtaacgggtatatcgcaactcctttacgctcacacgacttacagcctgaaggtgtggatgctgcctgctgaattgccgctgcgtttttatttacctgtgctttcatatccattatcaaattcctttctcagtcgcgtcatgcctgacgcagctcctgccagacaaagtccgggagggtctgaagcagttgggtaaagtgcagtgccgggttttccgcggcttcctgcagtcgggcctgtacgactgcatgtgtagtgatatcaacgggcaaggtcagggcattgagcgccaggcatagccggtcactgagatgatgcagccccgatttatcagcggcaaaccaggcatcagccgcaagacgcacagcctctggaggtaaagcgtcatttgattcatgccaggcagacagcaaacgccagatattacggacttcagcttgtgcgtgttcagctccccagttcagcatccaggcatcaccaccggatttaccactcagtgtcctcagttcacccgtacaggacatccagtgccactgagtcgttgcggcaagcagacctgccagcaactcagggtcagcagtcgcctgcaacagttcaaggcgcaggggttcgaacgcagggatactgacgcccggtttgatgtgtttgcacaaatcagccagccagacagccatttcatcaggcgaaagtgctgaattcagccagccgcagacatagcgcttctcgtacagtgcttctccgaatgcataggtttcactgcttcggaccagatcttcatccagagacccgcccggagaagcaagcaacagcagaatcggacaatgctccggcgaccaggctaaatccggacgcaatatcctgcgcagggcatcgctaccgttgctattcctgagcatgtctgcgtgcagaggatcccagctcgccaccttttttagcggatcaagcaccaggtagcggtattcattctgtctggcattcagggcatcagttaagttagtgagggtatccatcagagcgcactctccacacaactggccgccggtggcagttcaggttgtgtcgggctgaagctctgtgatgccagatggttcaggctggctgatttggcattcacatcaccaggcgtcagaatattgacgccagacgggtcgatgaccacagcggttttaccgcaacataaagtaattttcttgcttgcctgaatcaccacctcatcgtctttactgatgatggtcatgcttttcagggaggtcagcatcattgcatccccttgtgcctgaatatcaaccttacccttattggcatacatcttgatgcccagcgttttggcaaacaggctgatgatctcgcctgccgcaacggtgaattttttgaagacgctaaagtcactgttctcgccggaggtctgaataaagttctgtccgctgctgatttggatgctttgcggtgatacctgagctatcccgtccggggcgctcatcagcaacgcggactgctgcagatccttgagagaggatcccagcaatgttttttgcgcctggatctgcgcgagttcagcctgtgcagtggctacagcatcgctcagtgatttcgctaactgctgcgcctgattgagtgtccccagcgccgcatccatcgccagaacctgtccctgacctttgatttgtgcatctgcggtgatgaaaataccctgctgtgcacgaatagccccccagctgtccgtcctgagttcaaaaccttccccgcgctgttgtttcttgctgtcgaccagatgtccgagattcagctggctcttgccgccgtactccgtcgacaccttgatatgctctttcccgcgctcgtcatcaaggcggattttgttgttcgccggggtgcgcaggacgttacgtttgtagtttcggatagtgacatggtcaccgtgcgccgagtcgtgaagtacgccagaaatgtacggtctgtccgggttaccgtcctcaaaaccaatcgccacctcggtgcccgcgagcagcggcagatgcagaccataagtgtccccggcatacggccgggactgacgaacccacaggctctcgaacccggtctcccagctgtcccggtcaaacagcatgttgacgcggtagcggccgtccttatcgatatgcccgtaggtgtcattttcagtggtactggtgacgcgggccggtacggtgcctgccatcaccggacgactgccgggcgccgggcggaaactaaaatccgggctgtccgggataccgtcaaacctgatgccaaagtcctcatcacgccgcgcatggctgtgcatcgccgtgatgaccacgccctgcgcaaacacgtctgccacttcgtacccgccggtgactttcagcagcatccccggagagagggtcgggcagctggtgacggcccgggtctgcgtctggccattcaggtagcgttcgtgacgaatgcgggcatagaacgccccggactccggtgccggattacggtcatgggagtttcccgccgtcaggtagttatccgcccagtgataggcctctccgtaagtggtggcatctcccctggtcgtatcaacgagggtgttcatgtcttccgtggcctggcggtagttgtaatcgcggatgctgacctgcttctgcaccacgttatgatggctctccatctcccacaccgagtccacaccctgcgaatgctgcccggatggcggcaccgacggcagcgtcaggcctttctcatacccctgctggctgtcgtaaaactccaccacatcgatgttcagccgcgtgtcggtggtaaaacgaaaccagagaccgacctcacccagcaggcgggtgataaagtgcaggtcgttctcaccgtactgcatcacctgttcacggcgcggatactcttttgagagcgagaacagaaaatcctgaccgcgcatgttgtgacgctcgcgcagaattttttccacgatttgtgggaccgacatgtcctgataaatggcgttctggtgcgaacggtcaagcagcgccaggcgtggctcaagcgtcagggcgtagcgggtttcgtcctttgaggtgcccaggcgttcaaaacccgtcaccactccctgaatcacccgcaccggctgctggattttgatgccgtagccctggtcaaccggggcctgcagcgtcagggaagccgctttcatcagcatcatctctttgctgatggtatggtcagcgctggtgaactcaatacggtagcggaagggtttgctcagggcttcatcgccttcaaacgccagtacatcgggctcggcgtcacagcctttcaccgaaagcagatgatggctgtggctgaatcttaacggaggattattgctcatgcgtgcactccttctgtgaggtcaaactccagtccgataccctgagccagttcgatttccggctgcagatccggccgctcgtcagattgcgcatccagtaacgggcgcaggcgctccagttggctctggccaagcgtcagtaagggccacagccaatcacagcgagccaggttaggtttcccgcccagcgccatcagcagatgaacgctgcggatgctctgctctccggcaagcgaggccagcagccagtgccccggcaaaattttcgcatgggtgcgggtctgacagagcgaagccgccccttccatcgcacgggcacagtaagggttcagacatcgcaacaggctggctggattttccatgaatctctctctttgtcagttcctggacacgctaccgcccctcgctgttcaccaaagcgcataaggtcaggcagacagattgtatttttctttgctgagtgcccgcatatcaggctctcagcaaaaaactgtggacaggaaaccccgcccgcatcaggcgattgccctaaataattcgtgttgcaggcaggcggcaagttcgtgaatccccgggagcatagataactatgcaaccggggtgagcggacgtagccaacgcacctgcggcgcgaagtatgacgggcaattacgcggtggcgcgttcgttccagctatcggaatgaatgatgttgccgtctttgtaggtccaggtgattttttcgtaacgcagttctacgcgctcaagatggttgtgcttctctttagaaggatccttgatgtcgtacatttcaggggctcactttcaccaccttcacgttttcgagtttggtgttgaagtactccacttcctggcccgcgtcgttgatcttgtaccacttgaattccgcagacttgagggtctgaccggtggtcaccgccttgtacagatacgggctggacgagtcgatttccttggtgaacaggaacggcgtgtggatacgggtgccggtcagtttgccggtgttgttatcggtcgggatgtacaggttatgctcctgagcgacaacttcgatgctgccctcgcgatcctgaacgtccacagatcctttaatgtccgcaccgccgtcgtctttcagccaaagataaacaggaattgccatggaattactctccattgtgttgtgatgcgccatcatcctgcgatgacgccgggtatttgccgggtatctgacaggcattggcctgcggtaccagactgatttcgacacggcggttgagcgtacggccctccggggtgtcgttggttgcgacaggacggctttcgccatagccctgcaccgcaaaacagctttccggcacgtcgccggtgtcacgcatccagtcacgcaccgcttcggcacgtttctgagaaagcgtctggttcagttgcggattgccggtgttatcggtatgcccggacacgacaatcagccagcccggtctggccttaacgcccaccagtgaattgatcagcattttggtggagcctggcttgaggttgtacttgcccgagtcgaacagcgacatgctgtcgaggcggataattttcgctaccggtttgggtttcggctgtggttcaggcggcagtggcggcggcacatacgagcggatcgcttccagcaccggcatgcgcagacgcccgccctgatacaaacccaggctcagccgggccggtacaccgttacgtgcatggtcgtccagcaatgccgcatcctcgcgcagggccgcaacggcgtcggctttcgggccgtagtcatccatagagatgcggtcgtaacgggtaatatcgaagctcacgcgttgcagctgctggcgattgttccagccactgctgagcagcgcagcgatagtcgccagcgtgaagatcccgagcgcacagcggaaggctttgtcatgcggcgtcaggcctcgcccttccggcagcaatggcaggacaaaatccggcaacggggaaataaccgtactgtccgttcccaccggctgccagccggtcacctgttgcatcgcggtatgatgggacaaccacgccgtccaggccgatgtggccaggcttccggcaaggattggtctcatgccccacaccactgcggcaggggcaatgaccggcacatcggggttctcatccataaaaacagcctggacgtgctgatggaaccagctcatcaggctgttcatcaacacctgctgctgcatcgcaggcgttccgccggcggtgacccatgcagcgacagagcccggaactgaagattcacgccagaccctcaccccttcacccgggagagccatctgccagaacaggtcattcgtcatcgcgctgccgacctgaccattcagaatcagtggcacagaatgacccgtttctttacgcagctggctgatgcgccagcgcagggtcatcagacgactggtcagggcttcgctgtccgggtgttgctgcggacagacacaaaccattaccgacagctgacgcccccagtccgggcgcagccacagtatctggcgggctacctgctccaggtcctgatgatcctccacgcggatccagcatccctgcgggacgatgagtaccggtgattgatgcggccaggccagcggcagatcgccgcagaccagcaccacgggctgacggtaagtggcttccggtaggttatccagttgcagggtgacgtcatgccgcgcgcggcgactggcgacataccagcacgccatgataagccccagaacggtaagcagaacgagtactgacaccagtcgggtgaccgacagaaaacccaggcagaccacggtacttagcaaggcgccccacagcgcaagtccgcgctgttgcgcagggctcatttcaccgctcccggcaacagggtctgcagcatctgatccagccagcgatccagtccccaccagagtgcggcaaccaccaccacgctcaggccaatacgtacgggccatgatgccagccagccgcccatttcccgtccggcgcggctttccaccaggactggatgggtttgtggatagctgaacggcgtgacatattcatcaagtgcattaatgagtttctggcgttcagggtcgttcagagagcggaaattgccgaggaaacccagcatcatgactcgctggaagcaggtcacaacagcgtggtcaggagccggttcacgcagcacatcacgcatccgatcgcacagcgtgtcacccgcgtccatagtgccaaggaagagcccctgcaggggaatgtcataccactgcacgcaggcatcgtcctccacacctcgacctttgaccgcctcatcgagcaacgcacactgtgccgtgagaatatgctgacagctggcttcatcaagttcgctcgctttcagctcacgctggactcgttcgacatcagcaatgcagcgttcccaaagcgtgcgcccttccccgtcctggaatatcggaccgtgacgcaggcagatcacctgcagccaggtatcctgaagcagggcatctatatcaatggacgcggcgccgccgcgtttacgctcactcatgttctcagtaccgcaaagaattcaagttcaggctcgccgagcattcccggaacgtaaaacatacatgtgccgctctggagcatttcggtggtcagggggtgagagacatcaaggctgaagtactggttttccagacgcagtggaatggctgccggtacatgacgcagtggcgcgagaggtacgcccacccgcgatgagttgacgatacttctgacatgatcgggactgccgatcttgcactgacgcgggaactgctcctgcagctgtgccgccgacatccgcgaacgcacggacaggtagtaatccgccccttcacgcagacgcgggtcatgcagacgggcctgccagaagtgcagccgggcatcgtgctcaagttcaatcgccaccacccgcgacggcaggctggcttccagcaggtcacccagtaaatcaaacagcggcgggaaaacgttattcagttgctcatgctgccagaccgggatcgcactcacctggtgctccagcgagaaggtcagcaggctgcccgccagacgggccagctccggatacagacgctccggtgggttttgcggatggcgctgaaactgtccgagcacgggctcagcgctgttcagagcattgagcaaccagaacagggacacatcggccacggcaaaatccgccatccgttcgttgctttccctgcgcatatccatcaggcggctcaggcgggtacgcaactgggtcatcagttgctccagttgggtcatcagccagcggctaccctggatggccaggagcgggggaagaaacgtctcatcaagttgccacgccctctgcgaatcctgctgcaggcgggcgatcggacaggtcaggtaatcgctgttattctgatgggcgaaacgcagcgtcagctccgggcgcatcaccgcaatctggcgggtatcttccccaaaggcgttgcggacatcccgccagcgctgccgatagcgaacaggacgctcagccacctcatcgggtttcaggcagttgccgccgttcgcccgcagcagcggaagggccagtaccaccaccacgtgctgtgattcattctcaagcgccagtaccggtggcaaatcgtcagcgttatccgtatcgattaatgtcccgtcggggaaacggatatgcagatgacgggcctgcaggcggcccagtttcagtgcatccgattcgaatgtggcatcgatcatcccccagggatgagaaagcccgagtcgggcgatacattccgcagaccaggctgaatacgcggcctgctgctggaagtgctggggagagaccataacgcccctgccccataacggttgttccgttttcattggctttctgccttagcttattatttcgcctttggcatctgagaaaccagagacaggttcacgtccatcccttccacctggaagtgcggcaccgcgtacagcttcacccggaagaagcccggattgtcctcgatatcttccaccaccaccttcgcgtcgcgcagcggatgcgaggcctgcagctcgtcgcccgggtcggtcatctccgtcaccagaccgcgcacccaggtgttgagctccagctccagcaggcggcgatccttggtggtgccgatgttttcacgctgaacgagcttcaggtagtgcgcaatgcgcgacagcaggaagatatacggcaggcgcgcgttgatgcggctgttggcggtggcgtcggcggtgtcgtacagcgccggcttctgggcggagttggccgagaagaagcaggcatagtcgcggtttttgtagtacgacagcgggataaagccgaggctggcgaactcaaactcgcgggtttccgggatcatcacctccgacgggatcttcacctggttgcctgtgcccagatcgtagaggtggatcggcagatctttcaccgctccgcccgcctgcgggccacggatctgcacgcaccagccgttattaataaagcttttcaccatattggacgcgaaggagaacgaggcgctggtccacaggtatttctcatggtccgggcctttcacctgctcgacgtagttgaagctgcgcaccggcacggtgtccggtccatacggcaggcggcccagcacgcgcggcatcaccaggccgatatagcgcgcgtcgtcggtgtcgcgaaaggatttccatttgatgtactcggcgcggtcgaagtagttgccgatatccttgatggcggcaacctcttccatggactctttcagaaagaaggccgggccgacggcgccaataaacggcatatgcgccgcggcggagacgccggagatgttgcgcagcagcgccacgtcctgcgggctggcgtcgaactcatacgcggagatcaccgagccaatcggctcgccgcccggggtgtcgtactcggcggtgtaggtgtgccagtagagaccgctctgaatcagctccggcgcgtcttcgaagtcctggcgcagatcgtctttggagacgtccagaatttcggttttgacgttctggcggtagtcggtgctgtccaccagctgcttcaggccgcgccacagggattccaccttctggaactcaggatggtgcatcaccgcgtccagctggcggctgatttgatagtccagctccgcgatatggtggtcaatcagggtcttgtcgagcttctccacggtctttctggactgacggatgcagtccataaacacctgcatcgccgccgtcagtcgttcgcccgccggggcgtcggacagcgcggcatcatccagaaagtcgttaatatcgcccaggcgggacgccggggtcaggttgattttgtcaaacagggaagcgtaaacgctctctttttccagtacagcggtctgcccctgcgcgggggcggtttcagtatttacagacatcagcatattcccggttaatccattaaataacgcacgccgtttatttcggggccagcgcgctcatttcgtcgcgtaattcctgcgtcagcgccgggtctttcaggattttctcaagctcttttctgaaagtggcgttatcaaggaggttggatttgaggtcgcgtaataaattccgcatcgccagcatggcgcggagctgggggatctggcgggccacctgctccggttcgaaatctttcatatcggcgaagcggagctgaatattttcttcggcgctatcaccggccagcgtgttctgtaccgtgaggctgatttccgggctgaattccgaaagtacgctgttgaagttatttttattgacgttgatttttgctctttccgataatggccggtcttctttgccattactgaaatcaccgatggtgaggagtttcagcggcagctcgactttcttctgcgcgcctcctgtgtgcagagccagctttaaattaatgcgtgccttgggcacctcattctggaacgtatcagccatagcagtcccttcccgtgaggaataatgtgttaaagataacggtgtgtgaagacccggatatagtagagcaaagcgtcaaaaaatatcaacctgccggttgcaaagtccattataagactttcctcaggcatcttaaggcaaatgtaaaaatgaaacgcatgagacaaacaaagctggtatgtaataacaactcttttcttacaataaaggcaggatgtatacctgacagaggaatgtgaattaaattcatatctgaataggcagcgttgattgatgcaaatcaatatgtaacgcaaatactggtcgttccggatactgaaacgcgcgcgagcaggggcgtaagaaataaattactttttattcttcacaggacatgaaaaactccagtaccgggcatgaatatggttataattaatggctgacaggattaatataaaacttacaaataatacttgtcagatatccggtatcgatggttaaaccggacacgtatagagtcgcgctgagcgcaaaagaaatagcggcatttcattcagcagatatattaaaacacaacttacaataatgcctctcactcatatcatgccctataaccttccttgcgccctccccgtggacagagagagacaacgtctttctacggtgagccatcccagtcaagtcgccagagagaacattcagcgttaatgatccctcacatcataaccagactgcccggtctcaacgctgcacttttcccctcagcccttctctttaccgccacagattcaaaaccttgatcttctccgtggctcagcgcagcatggaaatgcaaacacactaaaacaagaattcgcaacccaatcacaggagagaatcagtgcaaacaggacatcgcttccaggccacggatctgcatcaatttgttaaaacccttttcacccatatgggaagctccctcaccgaagcatcgcttatcgccgaccacctgattgccgctaacctggccgggcacgattcccacggcgtcggcatgatcccaagctacgtacgctcccacgcgcagggttatctccagctcaatcgccacgccagcgtgatgaaggacgcgggcgcggtggtcacgctggacggcaacggcggcttcggccaggtggtggcccatgaagccatgcagatcggcattaagaaagccagagagcacggtatggccgccgtggcgctgcgcaatgcgcaccatattggccgcatcggctactgggcggaacagtgcgcggccgacggaatgatctctatccatttcgttaacgtcgttggcaacgtgatggtcgccccgttccgtgggaaagacagccgcttcggtactaacccgctgtgcgtggtgttcccgcgcgccggccatccgccgctgctgctggattacgccaccagcgccatcgccttcggtaaaacccgcgtcgcctggcataaaggcgtcccggtaccggcggggtcgctgatcgacgctcacggcgtccccactaccgacccggcggtgatgcagacgtcgccgctgggggcgctgctgacctttgccgaacataaaggctacgcgctggcgacgctgtgcgaaattatcggcggcgcggtatccggtggtaaaacctcgcatcaggagacgctgcagggcagcgtggacgctatcttcaactgcatgaccaccattattctcagcccggaagcgttcgatgcgccggatatgcagcgcgagaccgaagcgtttatcgactggtgtaaacggtcgccgcacgacccggacgcgccgattctggccccgggcgagtgggaagaggctaaccgccagcagcgtctggcgcaggggataccgctggacgccggcagctggcaggcgatttgcgccgccgccgaagaagtcggtttacccgccgacaccctcgcgcagctgcgccagaagctggcctgattttccccgatgacgcccgaacgggcgtcatgtcatcgtcattagtgtcgacatcaccgccgcctcgccctgcctgatcaactattctatacaaattcaataagttaagttttggcacagcgtatgcataacgctcccgtcatttgccggtgcgctggctcatgacgccctgacaaaggcgggccgggcccggcctgtccattgttgtttattctctgttaacaggtctgttactgatgaaaaaaatcacgagcgtttgcccttattgcggggccggttgcaaacttaagctggtcgtcgaaaacaataaaattctccgtgccgaagccgccgatggcgtcaccaaccaaaatcagctgtgcctgaaaggctattacggctgggatttcctcaacgacacccagctactgacgccgcgtctgcagcagccgatgattcgctatcagaaaggcgataagttcaccccggtcagctgggaggaagctatccgctatacggcgaaaaaactgcgtgaaataaaggagaagcacggcccgcgcgccattatgacgaccggttcatcgcgcggtaccgggaatgaaaccaactatgtgatgcagaaattcgcccgcggcgtgctccacaccaacaacgtcgactgctgcgcccgcgtctgccacggcccgtcggtagccgggcttcagctggcgctcggtaacggcgcgatgagcaactcgattagcgatatcgaaaactcgaaatgcctgctggtctttggctataactgcgccgactcccaccctatcgtcgcccgccgggtgattaaagctcgcgaaaacggggcgaaaatcatcgtctgcgacccgcgccgtatcgaaaccgcccgcatcgccgatcgccatctgcagctcaataacggcagcaatatggcgctggtcaacgccttcgcccacgtgctgctggaagaggatctgtataaccacgactacgtcgaccgctttaccgaggggctggacgcctatcgcgaaacggtgaaagactattcccctgaagccgtcgaagggatcgtcggcgtgccggccgctgaaattcgccaggcgatgcgcatgtttgccgccgcgccttccgccaccattatgtggggcatgggagtcacccagttcggccaggcggtggacgtcgtcagagggctggcgagcctggcgctgttaaccggtaacctcggacgcgccaacgtcggcgtggggccggtacgcggacaaaacaacgtccagggtgcctgcgatatgggcgtcctgccgaatatgttccccggctaccaggacgtcaccgacgccagcgttcgcgataagtttgccaaagcatggggcgttaacccggctgtcatggacgaccaggtcggcacccggatcaccgaagtgccgcacaaagcgctggctggcgaaattaaagcctactacatcatgggtgaagatcccctgcaaaccgaagccgatttaggcctggtgcgtaaggggattgaggcgctcgattttgtggtggtgcaggatatctttatgaccaaaaccgccgaaatcgccgatgtgctgctacccgccacctcctggggcgaacacggcggcgtctttacctgcgccgaccgcggcttccagcgcttcgagcaggcgattatcgccaccggtaatgttaagcgcgactgggaaatcatcagcctgctggccagcgaaatgggctacccgatgcattacgataacaaccagcagatctgggacgaaatgcgcgagctttgtccgctgttctatggcgtcacctacgagaaaatgggcgatatgaaccacgtccagtggccgtgcccgacgctggatcaccccggtacgccatggctgtataaagataatctcttcgatacgccaaccggcaaaggccagctgttcgccgccccgtggcgcgcgcctgccgagacgccggatgaagcgtatccgctggtgctctgtaccgtgcgcgaagtcggccactactcgtgtcgttcgatgaccggcaactgcgcggccctgcaatcgcttgccgatgagccgggccgggtgcaaatcaatcgcgccgacgcgcagcgcctcggtatcgccgaccagcagctggtgtgggtcagctcgcggcgcggtaaggtgattacccgcgccgacatcagcgatcgcattaacgaaggcgcggtgtatatgacctatcaatggtgggtcggcgcctgtaatgagctgacgcaggataatctcgacccgatctcgaaaacgccggaaaccaaatactgcgcggtgaaggtggaggctatcgcggatcagcgctgggccgagcagtatgcctggacaagctatagtgagatgaaagcgcgcctgaaagcggcggtgaacgtgtaaaacaacgcagggagatgcgcgcgtctccctccatatccacttttgctcccgggggctgcgctcaacgcgccttgcccgggctacagattcaccgccatctgcggatcggtagcccggacagatgcgcagcatcgcctccgggaaattcagctactctgcgctctgttcccgggggcggcgcgcaacgcgccttgcccgggctacaggttcagtgccgtctgcgggccggtagcccggacagatgcgcagcatcgcctccgggaaattcagctactctgcgctctgttctcgggggcggcgcgcaacgcgccttgcccggtctacaggttcagtgccgtctgcgggccggtagcccggacagatgcgcagcatcgcctccgggatcggtctcttacgccaacagtttctccaccagcgccgtccacagcgccacgccgtgcgggatcagcgcatcgttaaaatcatatccggcgttatgtagcggctttgacgccgtctcgccatcggtaccaatccagaaataggcgcccgggcaggcctccagcatgcaggcaaaatcttccgaggccatagagggattgccgttccagctcaccgccgattcccccagcagcgcggtcgccacctcgcgaaccttttgcgcttcagccgggtggttggtggtgacgggataaccgggataccaggcgattttgccttccacgtctgatacctgcggctgggcggcgacatagctttcaatcagccccctgacccgctcacgcacctggttattcagacagcggaaggttccgcgcagcaccactttatccggcagcacgttgatcgcctccccgccggaaatctgggtaatgcttaccaccgtggattcctgcggcgacaggcggcgcgacggaatggtttgcagcgccataatcagctgcgccgcggcgacaatcgggtccgccccgcgctccggcatcgccgcatgacagctcttgccggtcagggtgatttcaaacgcatcgagagaggccatcatcgctccgctgccgatcgccacctggcccagcggcatacccggccagttgtgcagcgcgtaaatggcatccatcgggaagcgcgaaaacagcccctcttccaccatcttacgcgcgccgcccaggttctcctcagcgggctggaaaacaaagtgaacggtaccgcgaaagcggcgggtttgcgccagatgcgccgctgccgccagcagcatcgcgctatggccgtcgtggccgcaggcgtgcatcacgcccggattacgcgatttatagtcgacgtcgctctgctcggcgatcggtagcgcatccatatcggcccgcaggccaattaccggacccgggccgttctccagcgtcgcgaccacgccggtgcccgccagaccgctatgcacctgaaggccaaatgaagcgagcagttcagcgacccggcgggaggtttcctgttcctgataccccagctcagggcaagcatgaaaatcacgtcgccagcgaatggcctcggcgatcagtgaaggggatacagccatgtcttactcctttcctgcacagcttcagcgctgaacgagtgttttatgcaatacgttggggctacaggtaacccgctagcctattggttatatcctttcgcccgctcgctgacaactgccgccaaaccctgcgccaacgcgcctttgcgcgccatcccgcctgcactgcgtttttttgtagtcatatcaacggtgacataaggcgtgcgattaattattatgcagctatactggcgttttgccgaataattcactctacagacctccttaaccggaaataaaatgttcaacccagagcagaatcgtcttgcccccacgctggcgatgatcatggcggcttcattagtgggatttatcaccggatacacggtgcccttaatcagtctggagctggcgcagcagcagattgataccgtttacgtcggcctgctggccgcgctaccgccagcggggatgatgatctcctccttcctctcgcacgcgctgtgccggcgcttcgagatggggcttctgctctccgtcagcctggtggcgctggcggcggcaaccatcgcctcctgcctgtcgtttgatatggttcatctcctgctgccgcggctggtgaccggcctggcgtcaggggtgattatcgtcattggcgaaagctggatcaccggcggcgcggcgggtaaaaaccgggcaaccctgaccggcatttatgcctccgcctttaccggctgtcagctcgcgggaccgctgctgatctccgccggagaagcgtatcaatcatggactctgctgctcgtcgggctggtgaccctcgcctgtctgctgatgctccgccatttgccctccggcagccgcgaacggctggcggaacgcgccagctggcgcagcctcggcgcctttttgccggtactggcttccggcgtattctgcttcgccttttttgatgccagcatactggcgctgctgccgctttacggtatggataaagggctgagtgaagtgacggcggtactgctggtcaccgtggtattaaccggcgatgccgtattccaggcgccgctgggctggattgccgaccgcttcggtattcgccgcgtgcatctgacctgcgcggtggtcttctgcctcgccctgctggccttaccgttcctgctggcgtcgcatatccagctgattgtcggctgtctgcttctcggcgccgcggcgggggcgctctataccctgtcgctggtccgcgccgggaagaccttctccgggcagaagctgattatgatcaacgccctgctgggattcttttggtccgcggggagcgtcgccgggccggtggtcagcggattgctgataagcgtcgcggggtatgatggtctgctgatgacgctgtttgtcagcggcgcgctgttcctgctgattcagtgcctgggtaaaagcgaaaaagccctgctggcggacgaacgcgagcgcgaagaagagatggatgatattagcgaggcggcgcagtaacgcttaagggcagacacggttcggcagaacgaaagcgccctcatcgcccgcgcagggtcttctccccggcagcgcagtcgcgcgccgggggcgggagccattacagcactttacttaaaaacgcggcggtgcgcgggttagtcggcgcgctaaagatctgcgccggtttcccctcttcctgaataatgccctggtcgataaagataacccggtcggccacttcgcgggcaaagcccatctcgtgggttacgattaccatagtcatcccttcgctggcgaggtttttcatcacctccagcacgtcgcccaccagctcaggatcgagcgccgaagtgggctcatcaaacagcataatcgacggcttcatcgccagcgcgcgcgcgatggccacccgctgctgctgcccgccggagaggctggagggccaggcgtcgcgcttatcgctcagtccgactttcgccagcagctcttccgccagacgcaccgcctccgcgcgcgccgtgccgcgcaggctcatcggggccataatcaggttttccagcaccgttttgtgcgggaacagattaaagcgctgaaagaccatgccgacgctttcccgcatcttattcagatcggtggcgcgatcgtgggcagcgaagccgttcacctcaaccacgccttcgctgacggtttccagcgcgttcatgcagcgcagaaaggtgcttttcccggaaccggaggggccgataatgcacaccacttcctgcggcttaatgtcgcagctgatgccgcgcagaacgtggctgtcgccgaagcgcttgtgtaaattacgaatgtgaatcacttttgccaaacctcttttccagacggttaaccagctgcgccagcaggaaagtaataacccagtaaaccagggagatggtcaggtagggttcccagtaggtggcgtaggcgccggaaacggtgcgcgcggcgtaggccaggtccgccagaccaatagccgacgccagcgaggaatctttaacgatggcgatagcgttgttgcccagcggcggcagaatgcggcgaaacgcctgcggcaggatcacctgacgcatagttttccaccacggcattcccagcgcgcgggaagcttccatctgccccttatcgatcgactggatcccggcgcggaagatctccgacacgtaggccccggcattcagcgtaatcgccacgatacaggagagaaacgcgccgtagtttgagcgcagctcgcgagcgaaatcagcgctcatcatgccgctggtcaccagcagtccgtcgcgcgggttgataaacagcggcaccagcgcgaagtgcaccaccataatttgcacgaacagcggcgtgccgcgaaacgcgctgacgtaaaagcgcaccggaaactgcaccagataacgcagaacgtatttccataccccgtgctcggctttcgccatgcgccccagcccgagggtcagcccccacagggtgccgaggatcacgcagataatggtacatttaatggtcatcagggcaccgtccataaacagcggaccgtactcctcaatgatctcccaacggaatcccgtcatagcccttccctaaaaaatacggctatcgccagagtcgatagccgtgatgaaaataaaaatgcgaattattgcgctggcagcgtcgggacgttctcgtcgaaccaggttttatagattttggcgtaggtgccgtcagcgatgattttctgtaaaccggcgttgatcttcgcctgcagctcgctgttgcctttcgccaccgcgatgccgaaatactggcgctcaaatttggcatccggcaccagcttgaactgcttctccgggtgctgcttgatgtagtatttcaccacgccgacgtcgccgaccgccgcgctcacgccgtcttcaaacagctcctgcagcatcagcggagtattatcaaaacgtttgatcgcggtactgttcttgcccagcacgtcggaaaccacgatatcgccggtgctggagttcaccacgccgactttctcgttttttagcgcctcaagggaggagacctttgaatccgccggcacgacgatggactgctcggccgggaaataaggggcggagaaatccaccatctgcttacgcttatcggtgatggtgatcccggagataataatgtcgcggtcgccggtgttgagggtggcgaagatcccttcccacggcgtattgaccagtttgatatcaaagccttccgctttggcgatcgctttgatgatatcgatatcaaaaccttccagctgtttctggctgttctcgaactcaaacgggcgataggttccgccggatcccaccacgtaagtttgctgagccgcgtgggcggtgccgatcatcgccgccaccaggcagcatgctttcatccacttcttaaccatgacaactccgttttatgcattaattttgcataaaaatacacactgtcatcatggcatgcaaccggaaaccttcccgacggtaaattatctgccgtttagcttcgtttaccgccggatttcccgatggcccgatgcaattcattgatccgcttcatcgatttcaccgttttttgcggcgcggtggaggcgaccgacagcacgatcatctccaggcaaaccagcaccgtcccgtgcagcggcacccgcccattatcgccgccgcgcggcacctcaatgaccacctgcgcctcctggctaaagcgggagtccagcgcctgggtaagtaaaatcgtcgggatccccagacggcgggcctcgcgcagggtcgtcatcccctcccggtgcggcgacttctgccccatcataatcagcacgtcgccgcgctgcaggccgatcagctgctcggcgaggctaaacccggtgcggttcattacgtacgaaggcaggccgatgcggttcagcagcctggcggtatactccgccagaatgcccgaggcgccgatcccaaaaatccccacctggcgcgcgtcggtcagcagcgccaccgcctgggccaccgcggcgcggttgtcggggcgcgcaagcacttcgcaggcccgctgatgcccttccagcacgaaatcgatgctcgaattgacgtcgctggataaggcgctcaccgtggagatcattttttccgacgaggtcgccgacgggccgaaccagcgctccatggtctgcttcagctcccgcagtccggcgaagccgagcgcctggatggcgcgcaccaccgtggcgtccgaggtattggtcgcggcggcgatttccatggccgtgcgctccagcaccgcttcccggttttcgttgatatagctcaccaccgccagcagacgcggcgacagctgatgcgcgcgggcgcgaaaacgttcgccgaacaggtcaacccgccccttctctctttttaccaccgttttcatttcagcccctcgggcaaaggacgaccggcaatgtgcgactgtacctgggcgaccatcagcgacagcgcggcgtaggagttagagataacctcctcgcgcggcagcagaatgtagcgcccggtgcggcaggcgcgcataaagtcgcaccagccgggcatcacgccctccatcgcctgcagctcatcctgcggcctgccgccggtatcggaacgccaggtggcaaatacgaaatcggcatccagcgccggcagctgctcggcgctgacgtcaatacgctggccatcggggatgttgtcaatcagcggcgggaagcggaatccggcatcgcgcagcacgcgtcccagcgcatgataggcgtgatgcacggtaaccttgccgttgttggcctgaatcaccgagactacgatgttttgcgtatccaccatcgcctttagctgggctatctgcgcctgatagcggcgttcgaggattaagagccgcggctgggtgccggtgagctgcgccagcttacggtagatgcgcggccgctgccctgcaggtggtcgatgctgaccgttggcgcaatcttctccagctgctccaccgaaacgtggcggctgggctcggtaataatcaggtccggtttcgcggcggccaccgcttcgagatcgatatccgccgtgccgataaaccgaatcgcgctgttatcgaaatcaacgccggtcagctgtgcgctggcgcgtaaaaagtggctgccgtccggacgcgtcctcccgtggctggccaccggcgggacgccaagctcgatcagcgggatggtgatatccagatcgtgcagcgacacaatgcgctgcgggtgcagcggaacggtcaccgtacgacccaaatcatcggtgaaggtttgcgtatcggcggccgaggcgacgcccgccaacagcaccagcagagaaacgaaccaacgcatagcgatcctttttgatttacagggcgtcacggcgacgccagagcagaacgataaaaaacggacagccgaccagcgcaatcacgatccctgcagggatctgcagcggcgcgaaagccagtcggccaattgtatcggtggctaacaccagcagcgcgccaaccaacgcgctgccgcagagcagcgccacctggccgccgcgcagcagaaaccgcgccatatgcggcgccatcaggccaacgaagccgaggcttccgacgcaggaaacgctggcggaggtcagcagcaccggcgcgaaaaagcgcagcagggttagctgctgcaggcgtacgccgagaccgatggccgtgcggtcgccgagcagcgccgcatcggcggccctggcggtcaaaaaaaggatcagcgccccgggcagcgcccagcagaaggcgacggccaacagcggccaggtcgccgcgtgcaggctgcccgccagccagatcatcgccgtttgaacatcgcgcacgtcggcggtggtcataaaaatgcccaccgccgccgccagcgtccacgacacgccgatgccgatgagaataaagcgcgggcgcgaacagtcgcgggccagcgccagaaccagcagcgccaccagcacgccgccgagcattcccgccagcggccgccagaccaggcccaccgccgggaagaacagcaccagcgccagaacgacaatactggccccctccttcaccccgataagcccgggatccgccagaccgttgcgggtaatgctctgcatcgccgcgccggccagaccgagcatcgccccgcacagcagcgccataaacagccgcggcaggcggatatcaaagaggataaatcgctgctgttcacccacgatgtccgcccccagcagcgcacggaacagggtaccggagggcatcgggaagctgccgcgggtcaggctaaacagcgccagcagcaggatgacgagcagcgcgacagcggcgatttttaccgccgcagggcgcagcagaatgtgccagcggccgcaggtcagcggccgaaagccggcgcgacggacggcgcttttcatttaaaaaacctcgcggcgataaaaataaataccggcgcccccaccagcgcggtcatcgcgccggttgccagctcctggggcgcaaccagggtacgagcggcgatatccgccagcagcagcaccagagcgccaaccggagcggccagcggcagcgccaggcgaatatcttcgctaatcagccggcgcaccgcgtgggggaccaccagcccgacaaagccgatcggcccggccaccgccaccgccgagccgcacaatagcgcaatggcggtcagccccagcaggcgggtctgaacaatctttacccccagccccagcgcgaccttatcgcccagcgccagcacgttaagacgcggcgcgatgaccagcgcgatcgtcactcccgccagcgccgggagcagcgcagcgcgcagcgtttgccagttcagcccggcaagatcgcccgccagccaggtgcgcatcgccagcagcgtttgttcatcgaggatcagaatcgccgcggtgaccgccgaggcaaaggccgacagcgccaccccgcacagggtaatgcgcagcggcgtgacgccgccccgcccggacgacgacagcagcatcacgccgccaaacagcagcgccgcgccgcaggcggcggtgagcggtctggctaacgccacgccgccgaggctgattcccagcgccgatgtcgccactaccgccagcgaagcgccggcgttaaggccgagaatatgcggctcgcccagcgggttgcggatcacggtttgcagcagcagccccgccacgccgagcgccgcgccggtgagcagcgccgccgcgagacgtaccaggcgtaaatcgacaataattcggtggtcaaaattgcgcggatcgtaatggagcagcgcctgcagcaccgtttgcggcgcaatccagcgcgcgccgagtccgagatgcaccagcgagccgcccagcagcaggctcagcagtaccagcgccagccgggggcgggattgtcggcgcggcggcagcagcgcggaggcgctcataacgccttctcctcacgggcgcggaacggcataaaaaagggcttaccggtctgcgggttgagcgacatctgcacgtccacgtcaaagacggttttgatcagctccggcgtacagatttcctgttcattaattaccccggcgatcgcgccttttttaagaaacactagcaggtcggcgtagttcaccgcgaagttcaggtcgtgcaggacggtgaccaccgtgcggccgtgatcgcgggttaaggtttgcagcagttcaaggatgtcgacctgatagcgcagatcgagccaggtggtgggctcatccagcagaatcgtcgccgtttgctgggcgagagccatcgcgatccagcagcgctggcgctggccgccggagaggctatcaaccgccaggtgggcaaactctgcggtaccggtgagccgcagcgcctcttctaccgcccgttcatcggcctcggaccattgtcgcatcagcccctgccaggggtagcgcccgcgcgaaaccagttcaaaaaccgtcagcccttccggggtcagcggcgattgcggcagaatgcccagccgacgggaaacctcccgggtcggcatctggtgaatcacctcgccgtccagacgtacgcagccccccagcggcttgagcatccgggcgatagtcgacagcagcgtcgatttccccgagccgttggcgccggccagtaccgtcattttcccgtgggggatggtcagatgaatattgtcgacaattagcgtctggccatatccggccgacagggaatcaaggacgatcccctgctctgcaggcaacacccgctgtggcataactcgctcccgcgccgcaacggcgtggcgccaggcccgctcgttccgcactcaaacaaaaataaatctcattctcttttgatcatgcggtggatgaatgtagtagtcaataccctatgacggcgccggccgcgcgggtttactaccaaaatctgcacaacataaaacgactttaataatcaattaaaacaataatgtatgaaattttcacccagcccattcctcgctaattgattgattatttgtttcgtcagttttttatcttacataacgtttactactacatgccttcatgattgaatgattctcaattacatatctggcgcgcgttgcggcgtaaaaaacagccaggtttatttttcagggcaatgattttattggctttacctctccgcaaaggcgaggttcgttcacgagacacaaaaatgattccactcaatgtcccttattcggcattaaaagggcgtgcgcttttttcactgatttttttcacctcaccgggattattggcagcggttaatagcgccgataaaacaaagaaaaccgctgacgagaccataacggtcgtggccgacggcactcggcaacgcgctacccagggatatcagccggtcaatacctcgaccgccacgctgactaccatgccgatgctggatattccgcaggtggtcaataccgtcagcgagcaggtgctcgaggatcagcatgcgacgaacctcgacgaagcgctgtataacgtcgccaacgtggtacaaaccaataccctcggcgggacccaggacgccttcacccgccgcggcttcggcgctaaccgcgatggttcaatcatgaccaacggcctgcgcaccgtactgccgcgcagcttcaccgccgccaccgaacgcgtcgaagtgctcaaaggcccggcctcaacgctgtacggtattctcgaccccggcggattaatcaacgtggtgaccaaacgcccggagcgcagcttcggcggctccgtctccgccacctccaccagctttggcggcggtaccggccagtttgacgtcaccggccccatcgacgggactcagctggcgtatcgggtaattggcgaatatcagcatgaagattactggcgtaatttcggcaaagagaagagcagctttattaacccctccctgacctggttcggcgagcgggcgacggtgaacgtctcatattcgcaccgtgactacagtaccccattcgatcgcggcaccatcttcgatctgaacaccggccatgcggtgaacgtcgatcgcaaaacgcgttttgatgaaccgtttaatattaccgacggttattccgatctcgcgcagctgaatgccgaataccgtctcagcgacgcttggaccgcccgcttcgactacagctacagccaggatcattacaacgacgatcaggcccgggtaatggcctacgactcggcgaccggcaacctgacccgccgcgtcgatgccacccacggttccacccagaaaatgcacactacgcgggcggatttacagggcaacgtggtcattggcggtttctacaacgagatcctcaccggcctggcctacgagaattacgatctgctgcgcaccgatatgatccgctgtaagaacgtcaagggtttcaatatctataatccggtctacggcactgttggcaaatgctccagcgtttcggcatccgacagcgaccagcgtattcagcaggagagctacgcgggctacctccaggacgcgctctatcttaccgataagtggattgccgtcgccggggtgcgctatcagtattacacccagtacgccggcaagggccgcccgtttaacgtcaataccgacagcagcgaccagaaatggacgccgaaagcgggcctggtgtataagctgacgccgtccgtctcgctgttcggtaacgtggcgcagtcgtttatgccgcagtcctctatcgccagctatattggcaatctgccgccggaagagtcgacgtcttacgagctgggcgcgaagttcgatctgttcaatggcgtcaccgccaatatcgcgctgtttgatattgataagcgcaacgtcctctacacggaatccgtgggcgatgagacggtggcaaaaaccgccggtaaagtgcgctcccgcggcgtcgaagtggacgtgtccgggtcgctgaccgataacctgagcgttatcgccagctacggctataccgatgcgaaggtcaccgacgatccggattacaaaggcaaaccgctgccgaacgtgccgaaacacaccggttcgctgttcctgagctacgacattcacaatgtctacgacagcaatacgctgacggtggggggcggcggtcgcgcggtgagcaaacgttccggcaccaacggcgcggattattatctgcagggctatgcggtggcggatgtgtttgcggcctataagatgaagctgcaatatccggtgaccctgcaggttaacgtgaagaacctgttcgataagacctattacacctcctccatcggcaccaataacctcggcaaccagatcggcgatccgcgggaagtacagtttacggtgaagatggatttttaagcctcatccctgtcccggatcgcggcgccttatccgggctagcacattgtagcccgggggcggcgcggccctaccgcgccgcccccgggaatccccgccgaacggtcagaatcagcacgccccggataacgccttgccttaccagtcctctccctggccaagaatgcgcaaaatatcctgccgatgcagcagcagcagcggattgtcgcgatggcggggatacgtcagcggcagcgcaaactcggcgataatccgccccggtcgcggcgacatgattaacacccgatcgcacagcagcagcgcctcttcgatgtcgtgggtaaccagcaggctggtatagccctgctgctgccacagggcgatcagctcccgctgcatgctgatgcgggtaagggaatccagcttgcccagcggctcgtcgagcagcagcagacgcggctcattcagcagcgcccgggccagcgccgcacgctgcgccatcccgccggaaagctggcgcggccacgcttcgctaaacgcctgcagccccattcgcgaaatcagcgcgtcggcctttggctcaagcccctttttcccctgcgcctgcggtcccagcagcacgttttgccgcaccgtcagccacggataaagggtcggatcctgaaacaccagtatccgttcgggccccggtccccccatcgccgcctcatcaatctgaatttgcccggcctgctgcggctccagtcccgccagcagccgcagtagagtggatttaccgcagcccgaaggaccgagcagcgcgacgctctctcccggccgcagctgcaggctgatattctccagcaccggcaccgtctgtttgccaaggctaaaagcgtgatgcagatgacttatcgacaccgccgcgccggtcgatgccgcctgagaagtggcgttcgcggttaccattgcatccctccccgctgccagctcagcagccggtcgcggaccataaacagcccgctaatcaggccggagcagagcagcgccatcaccagcagcgccgcgtacatattgggataggccgcccagccctgcgcccactggagataaaaaccgataccggatttcacgccgaccatttcggcgacgatcagcaccgaaaacgatgcgccaagccccataaacaggccgacaaaaacgttcggcaacgcggcggggatcgccacgcgcaggatcaggaaacgctggctggcgcccaaggttcgcgcgacgtcataccacgccttatcgataccgataaccccggaccaggtcagcacggtcaccgggaaccaggtgctgagcgcgatcagaaacacgctggcgccgaagctggaggggaagataaacaggcacagcggcagcagcgcggtggacggcaccggccccagcagacgcaacaccggatgcacccagtagccgatccgctgggaccagccgatcgccagcccgctgataaaaccgcagctggtgcccagcagcaccccgagcccgagcagccccagcgaatgcagaaggctatcaagcaggcgcggccagtcatcgtgcagcacctcaatcagcgcctgcggcggcgcgaaaaacggcaccggcagaaacgccgtcttggccgtcagtccctcccacagcgcaaaaagcagcggcagcagcgccagccactttccggcatgctgcaggcgagtcccccgctgccgccagtagcggtagctcagcgccagcagcaacagtccgccgccaagggtgaactgcgccagcgcccacccttcgctaaacggccagcgccgcccggcatcgggccaggccagggtaaacaggccgcccagcagccatagcgcggcggcaagccagccttccttccacagcggcctgccgcttgccgggcgcgtcagcacccgttcaggcgaaaacgttgacataaatgctctccgcaaactgatggggatcggttcccggtttaatgacctgcacccgctgaagatccacggcgtactgggtcagctctttgacaaacgcctcgcccaccgcatgatggccgtgcccctggccgtggagaatgccgctgacctccgcctcattggtattcagcgcatgggcgaggaaggattgcgccacgctctccggatgcgcggcggcatagctgtgcgcctcaagaatcgcctgggtgagcgcggcggcggccggtttatgatcgcgcgccaggctaccgctgaccccaagcacgcagcagctcaggttagcgtaatcgccggtcatattgctggcgataagctgatatttaccggttgccagcagacgatagctgaagggttcgctgccgctgatggcggcaatttcgcgtttatccagcgccacgctgagtaaatctgccggatagactttccactgcacatcgcttatcggatcgatgccgtggcgcttaagcaagatggcgaagaagtttttatccggcccggccatatcggtgacgccgatggtttgccccttcaggctctccaggccgccgaacggcgagtttttcgccgtcagcaggttcaggcagccgccgtgggttccagcggtgagcttcacgtcgaagccctgctccagcgccttcagccagcgcagcgccatcccgacgccggcgtcggccttgccggtggcaatcgcctccagcagcacgtccgtcgagttgccgaagttaacgaactccacgtcgagattgtatttactgaagatcttctgctgctccgcgacggcaaccggcgccaggcacaccgcgcttttgttaatcgccagcttgattttgtacggctgcgccaggcgcagggccgggtgttcctcaccgctcgccatggccgccatatcgtgagcccaaaggggcagagaggccccggccagcgcaaggctgccggtcaagcgtaagaaacgacggcgagatgtcatcatggcgacacctccgcatgggcctgcgcggcaggcacgctaaagccgttatcaaacgtcggcgtcacgtccagctttgcgcggatcagcccgttggcgaggtaaaagtccgccgtcgactgctgctgagcgaccgtcttcgcgtccagacgcagccactgcgactggcgattggcaaactgcgcgcgggcgatatccgccgggaaacgaataatttcccccagcgttttaccgtagctatcgagattggcgtaggcccagcgctcggcgccggccaggcgattgaggtaatcctgcagcgccgcgcgcttctgcggatccttaagggcatcatcggttgccgccaggaaagtgttacccggcagcagccctttgccgctgaccagaatctgcccctcggcggtcttcaccagctgcgtggtgtacggctcccaggtcgcccaggcgtccaccgaaccgttgagcagcgccactttggcgtccaccggcccgagaaacacccactgcacctctttcggcgaaattcccgcctgctccagcgctttcagcgccacaaagtggccaatcgaccctttaccggtagcgatgcgtttgccttttaaatccgcggcgcttttcaacgcgctgccgggcgagaccagcaccgcggtgccggccgggttacttttatcgacggcgatggctttaaccggcgcgccgttagccagcgcgaacagcagcggcgcatcgccgataattcccgcatccaccgccccggcgttaagcgcttccgccagcggcgcggcggccggaaactcggcccatttaatctcgtaaggaagatcctgcagggcgttggctgcctccagctgcgaacgcatgccgcctttttgatcggcgattcgcagggtgattcgctcctgagccgccgcatagccgctcagggccagcagcataaccaccccggctaaaccggtaaaattaagtctgcgcatatgaattatccttatttttgaaaagcgtgtttgccggccgccagccacgcgctgtcgctctgcggggtatgtacccgcccgcacagcacgttgcgatagtggcgttccagaggattttgccgactcaggccatggttgccggtcagctccagcgccaggttcaccgcctgaatggcgttgtcggtaatcgtgactttcgcgagattcgcctcaatggcggaaaagcccagctgcgcggccttttccagcagagtgcgattgaccaatagccagccgtcaatctggccgactttttcctgcacccgcggcaggctggaaaggggttgcccaaggctgcccggaatacgcgtacccagccacgttaccagccagtcgcgggcggcccgcgcgatgctgtcgtaaatcgccgccagcagcgccgtatggcggttggcaaacagacgaaactgttccgcatccggcgcgggaggcgcatcggcaggccacacgtccaccgcgtgctctgcagccacccggacgttgttcagcaccacttcgtggctgccggttgcccgcattccggcgtgatcccagctgttcaccacggtaatgccctcactgtcgcggggcaccagccaggtgccgaccagcggcggagcgtcgtcgctgcggccccagatggccagccagctcagcccctcaataccggtggtatagattttatggccgttaatctgccacccttccgcgcggcgggtcgccacggtttgcggcaggccgccgcgcgccggggagcccagttccggctccacgcgcaggctgttgatcaagcctccccgctcgacggcatcgtgaaaaacccgctggcgcagcggctcggaccagttctcgttttccgccagccgcagatggtgcaggtactgcatgcagacgatcagcgccgtcgccggttcgccccaggcgatggccgcaatggcctgctgaagctcggctaagccggcacctgccccgccgtactgctgcggcacggcgaggcttaaaaaaccgcgctggcgcagacggtcgatattgtcgcggggaaagtcgccgctggcgtcgagactggccgcctgctccgccatcagctggcgtacctccgtcaaccgccgcgcccagtcatcgcttgtctgaccgatcacgaggcgcgctccgccacggcgcgcagggcggctttttcgcgggcgatcggcagcagcgctttaccgtactcctgagcatcgttgagcgggtcaaatccgcggatcaggaagttgcgcacgccgaggtcgtagtagtcgagcagcgcgtcggcgacctgttccggggtgcccaccagcgcggtggagttgtggccgccgcctaccagctgcgcgatcccggtccacaggcgtttatccaccaccttgccctgcgccgccgtcgcccgcagacgctgcgccccgacgctgtcgggcttggctttgaaaccgcctccgctctgcgccgcccgctcggtggcgacgtgcaggatatgctcggctttctcccaggcctcggcttcggtcgcggcgataatcggccggaacgagacgctgaagtcgatttcgcgctgatgtttcgccgcctcggcccgcacgcgctggatggtttccgcggtttgcgccagcgactctccccacagagcgaagacgttggcgtgcttgccggccacggcgatggccgcttccgacgaaccgccgaaatagagagggatatgcggtttttgcagcgggcgaatggccgaccacgcctgttccgcctgataaaagtcattggcgatatccaccggctgttcggcggtccacaccttgcggacggtctcaaggaaggcatcggtacgcgcatagcgctgatcgtgatcgaggtaatcaccgtcgcggcgctgctcggcgtcattgccgccgctgatgatatgtaccgccagacggccgcccagcaggtgttcaagggtagcgaacttacgcgcggcgagggtcggcgagacaaaaccgggacgatgagccaacaggaagccgatcttttgcgtcgacagacccgccagcgcggtcaccaggaatccgtcgggttgatcggaccagtggcccaccagcaggcggtcaaacccggcggcctcgtgggtttgcgcgaaacgcacgatgtaatcgcggtcaaaaatcgggccgaccggggcgatggtttccgacgacaggcggtggccgatcatgccgagaaattgaatgctcatgcagaactccttgtagcaggataatgagtgggccgccgcggcggcgcgttttcattaccctatacacgggctcttaatgaacaaaatgcatttttatcatatcttaatatgcgagataagcatttataaaaattatatatacgtttcagccagataagtttagctgctgaacgactttgccggcgaaaaaagtcagcggctggctcagattggccagattctgcgcgtgaaccagccacagatgcacctcgggctggaaatccgccagcgtcaataccgtcacctcgtcgcgccacgggctggcggccagcgcggcgcgcggcaccaggccaagccccagcccctgcgccacgaggctgatttgcagctgggcgcccgcggtctcgacattcagcgccagacgcagcccctgggactgcagttcgcggatcagcccggcccgcaggccgcagccgtcgggattgagcacccagcctttttccgcgcagtcgcgcagcgccccggcgtgaagacgccagcttttagccgcaattaccacaatatccagcgggcacagcaggcgcccgccgtagccctcagcaaagcgttgctgttccggccccatcgccagcacgccgtccagctcgacgctttcaaggcgcttttgcagcagcccgctccagccgcaggtcacctgcggtcgcagggcgggaaactgctggcgcagcgcgctcagcgccggctgcagggcaatttccgccacgctctgcgggaccccgagacgcaggataccgtgcggctcggcctcggggtcgagcaggccgtacagctttttggtctcccgcttgatgctcaggcactgctcgtaaacccggtgcccggcggcggtcagggtgagcggccgggtctgacgctccagcagcgttacgttgagggtttgctcaagacgctgcagacgacgggtaatcgccgattgggtaataccgagatattccgcggcctggttaagcgaggagaactgcacggtggccagcagtgcgtcaatgtcgtcgatgcgcatagcgtccttaatgtgatttttgcatattaatatatgcggaaattgcattttaattatattaacgcctttgctagcgtaaagaccagtcccgacaacaggaagcgaccatgaccgcaccgcgagtggaaaaattacgccagtttattcaagaccttgatgccctgcatcgcgaatttgccgatgaacagcccctgctcgacgccgtggccctgcgcctggccgcgctggtgaaaaaggatgactggctgccggaggagtacaccctgccgcatccccaccactatcagcagtatctgctgcatgccgattccggacagcgtttttccattgtcagcttcgtctgggggccggggcaatcgacgccgattcacgatcatcgggtgtggggcgccatcggcatgctgcggggcgcggaggagaatcagcgctaccgcctggacgagcgcggccagccgatggtcagcggccttgctgaacgcctttcccccggtgaagtggaaaaagtctctccccgcgacggcgatattcaccgggtgagcaacgccctcgcggatagcgtctcgatcagtattcacgtttacggcggcaatatcggcggcgtcaggcgagcggtttataccccggaaggcctcgtcaaaccttttgtctccggctactccaaccgccacttacccaatatctgggatctctcaaaggataattaatatgcccacctgttcttatcgcccggccgcccagctgcgccagacgctgctggacggcgccgagctggcgctgatcgacgttcgcgaagaggccgactttgcccgcagccatccgctgtttgccgctaatctgccgctcagcaagctggagctggatatttttcggcgcgtgccgcgcctgacgacgccgattaccgtctatgacggcggcgaaggtctggcggagcgggccgtcgagcgcctgcagagctggggctacgaagatgtcgccctgctggaaggcggcctgccggggtggcagcgcagcggcggagagctgttccaggatgtgaattcgccgagcaaagcgttcggcgagctggtggagagcgagcggcataccccctcgctgagcgccggggaagtgcaggcgctgctcgatggtcaacaggaggtggttgtcgtcgacgcgcgccgtttcgatgagtatcacaccatgaatattcccggcagcatcagcgtgcccggcggggagctggcgctgcgcattgagggcctgattccatcatcgcaggcgacggtgatcgtcaactgcgcggggcgcacgcgcagtattatcggcacgcagtcgctgcgcaatgccggtttgcccaatccggtctacgcgctgcgcaacggcaccatcggctggaccttagccgggtttgaccttgagcgcggccagcagcggcgttatgacgccgattttcgcgccccagccgaacgcgcggcggcggtgaggcagctggcggagcgagccggcgtcgcctttatagacagcccaacccttcagcgctggctgcggcagcccgcccgcaccacttacctgttcgacgtccgcagcccggaggagtacgccgcaggtcatctgccgctgagcgttagcgcgcccggcgggcagctggtgcaggaaaccgaccatttcgccagcgtgcgcggggcgcgcattgtgctgattgccgatgacgagatacgcgcgccgataacggcgtcctggctggcgcagatggggtgggaagtggcggtattacgcgatgcgcgcgcggaagattttagcgagcgcggtacccccgcaggccgcgtaccgccgggtccgcaggcggaggagattgccccgcagcagctggcggcacagctgagggagccgggaaccgtggtgctggactttaccaccagcgccaactacgtcgcccggcatattcccggcgcttactggctggtgcgttcacagctgcgccaggcgctggaggtgctgccttccgccgagcgttacgttgtcacctgcggcagcagcctgctggcccgctacgcggtgcctgaggttgcggcgttaaccggtaaaccggtgcagctgctgagcggcggcacgctggcgtggattgacgccgggctggcgctggagcatggcgagacgcatctggcgacgccgcgcagcgatcgctatcagcgcccgtatgaaggtaccgataactcacccgcggcaatgcaggcctacctcgactgggagttcggcctggttgaacagctgaagcgcgatggcacgcacgggtttaaagtattgtgatgtcccccgctcgcgctgcgcttagcggggctacgggctcactgccgtctgccataccgtcgcccggacagatgcgcagcatcgcctccgggaaattatgccgaactgcgctctgctcccgggggcggcgcaagcgcctgcccgggctacaggtccaccgccgtctgcgaacccgtcgcccggggaagggccgcaatcagatctccggggtatttttaaagcccatcagcatcagcatcggctcctgctgcgcccccgccgggtcgaaatgatagcgattgccctgacggtcgccgccgatataccacgagatctcggttttgccttccgccagcgccttgcgcaccgctttatcgacatccaccatccggtattcgcgtttggaattgaggtacagcgacgcctccgaactgtagttgcagggcgggcgatgattccaggtcacgctgttcgcgctccagtcgttgctcgccggatagaaaaagatctgatccgcgccgttggtttccacttttccgccgtagatccgcagctgatatttaaacagcgaggcgtcctgatcctgaggcagcggcgggatagggaatttcaccagcgtcatggtttccggattgtgcgtgcgcccgccgttttgccagttatcgctgaccaccaggttttccggcgcgggatgggcgaccgtcggcgcggtgctgtccaccagcgcattctccttcaccgtcgtgaagcgatacggcaccgcgctgccgcagtcgattcccttgttcatgcagcgctcggtcatatagtgcgccccttccaccgtccagccgttcataaaatccgcgtgcgccgtatagatactgccccagcgctcttcgcgcttctcaccgtccatgatcggatccagggagagctgaatcttcgcggtatccagagatgtaatctgcggcagaacgtaggccacattcatattcaccgtcgggattttcaccggatagtcgctcggacaggcgccgttgacgtcgtatgccgcgttactgtgtccgtgagccggtttgaggttgaccccatcccagcagttggggaactgaataccgatattaaactgtaccgcatcgccacctttccgcagcccacagacttcgccggccttgttgctgtagcctttgccgttagcgcacaaaaaggtgatgcgcgagctgggcgccgaaccgtggtgatcgcccgccagcagttcgagacccgccgggaacgggtgcagcggatactgttccactttggtggtctgatagtaggttttttgatacgccggcgtcaccacctgaccatccggcagcttcatcgatggcacccagtaggcggaaccgtcggccttgttatcgcaggtggtttccggctggtcgcgcagcgtctgataggtggaaaccgcatcggtatgggtattaccaaaaaaatcatgccacatggcctgattcggtttgccgaacatcatgatggcgtcatcgcccaacgtatggtgataagcgcagaccacgtgggcctgcgggccggcatgagcggaaaacgcgccggcaaccagcagcggcgcgagagttaaagtgaacgcgttcaatttcattttgcaatcctccttgtttgaaggagtgcagagatagcaaacgcccgccgatgttacacatcatcaaacatcatttcgtctcatcggcccgccccatcaggctcgcgcatgatccatgagtactgaaatgacttcggcgccgggaaatgcgtgcgccgacgaaacgaccccagccgctgcggcgtgcagtaggtgcagctccccagccactccatgttttcctccggtacgcccgcgctgcgcagcaggaggtgggcaaaagcccgcagatcgaaccacgcattgtcgcccgcggtcgctttcgcctgctccccctccgacgccgcctgatgggacaggaagagctgctcccgatggcgttttgccagctcgccggcgggcatcgccagcagcgcctggtagaagtcgccggtgacttcatagcagcaggggtgaatatgcggcccgctcaccaccaccagatcttgcgggtcgacgtgataacgctgaaacagcgcaaggctattttcgataatcccgctggccgcgccgcgccagcctgcgtgcacgctgcagacatagcgcccatcgcgcgacgccatcagcagcggcagacagtcggcggtcaccacgcccatcttttgcccgctgacggcggtaaacatcgcatcggcgtgggggcgctccgcctgcggcgcccgatactcatgtacgatattgctgtgaaccagtttaaccggcgccatttcgctatagggaaaggcggcggtttcatgaacgtcgagaaaggcgtagcggataccggggatatcgctcagtaagcgggatgtaaaagacatgatgctcggaagaatcaatggatgatgatttaacctatgccaaagtagagagatgcgcaaggcggattcccgggctaccagtccggtagcccgggcaaggcgcggctttaccgcgccgcccccgggaatcagcgaaaatgctcaggccagcgccgtgcgcttttgtcggctcatcagccagaacaccgccgcgcccgccagcagaatgccgggagcggacgcagccatcaccccgacggtgccggtgcccagcgccagcattttgcccgccagcagcggaccgctcatcgcgccgaggcggccaatcgccaccgccgtccccacgccggtggcgcggatttcggtgcgatagaacagcggagccagcgcgtaaagcacgctctggccgccagtggcaaacagtccggcgacaaagccggagaagagcattgcggtcagcgaggacgcggtccccagcgccagcagcgacgccagcatgccggtatagatcagcagcgacatccacagcgggctgagcttatccatcagcgcccccagcagcagcgtgccgcaggcggcgccaaactgcagaacaaacatcactcccgccgcctcgctggggctgaacccctggccgactaacagcatcggcagccagttgatcagcatatagaccaccagcagcgtgaaaaaatagcacagccacagcagcagcgtggcggtagcgttgcccggcgcgaggagcgtgcgcagcggcacgccccgcgcgctgcgctgaaacaccggcgattccggcagccagcgcagcagcagcggcaccagcagcagcggaacgataccgccgatccagaacaccgtttgccaggccgcggcaaggccgaaaaagcccagcgccgccgccagcgccgcgccgatggggacgccgcagtacatcaggctgaccgccctgccgcgaaagcgggggccggcggcctcggaggttaaggcaatcagattcggcagcgccgcgcccaggccgacgccggtcagcagccgggccagcagcagcgtgggataattccacgccagcgcagtagcgattgagaacaggccaaagagcagcaccgagcccagcagaattcgcttgcggccatagcgatccgccagcatgccgcccaccagcgcgccgggcagcaggccgaggatcccgacgctgaaaatccagcccatctgcattttatccagcgcgaacgcctgcgccatgcctacggcggcgatgcctgccgcctgcagatccagcccttccatcagggccaccataaaacagagcccgacggttaacatcaggcgcgaattgcttgcagtcgttgtttgggtcatagggtacctttgcgatatccggacaagcggagcaggtgaatggcggctgatacgttgccagccgcgcgttgcttttatttgctgcggttaagcagatccagcgcgacgtcgacgatcatatcttcctgaccgcccaccatccgccgcttgccgagctcgacgaggatatccaccgcgctcaggccgtagcgcccggcggccgcttcgctgtggcgcagaaagctggagtaaaccccggcatagcccagcgccagcgtttcgcggtcaacccgcaccgggcgatcctgcagcgggcgcaccagctcatcggcggcgttcatcagagcatacagatcggtaccgtgattccagccgagcttatcggcggcggcgataaacacctccagcggcgcgttgcccgccccggcccccatccccgccaggctggcatcgatacggtcgcagccctcttccaccgcggcgatggagttggccacgccgagactgaggttatgatgcgcgtgcatcccggtggcggtttccggcttcagcaccgccttgagggcgcggaagcgatcgcgaatatcgttcatgttcatcgccccgccggaatccaccacgtaaatacaggtggcgccgtaggattccatcttcagcgcctgctgcgccagctgttccggggaggtcatatggctcatcatcaggaagccgacggtgtccatgcccagctcgcgggcgaaggcgatatgctgcgcggaaacatccgcctcggtgcagtgggtcgccacgcgcaccacccgagccccggcctgatacgcgtttttcaggtcgtgcagggtgccaatgccgggtagcaataaagtggcgatcttcgtctggctgaccgactccgccgccgcctcaatccactgcaggtcgctgtacgcgccgaagccgtagttaaagctggaaccctgcagaccgtcgccgtgggccacctctatcgaatcgacgcccgcgcaatccagcgcccgggcaatctggcgcacattgtcgagcgagtattgatgacgaatcgcgtgcatcccgtcgcgcagggtcacgtctgagatatagagttttttgccgttcatgctgcttctcccgccgcgtcgttcatcgcctgggccattttttccgccgtcgccagcgccgccgacgtcataatatcgaggttacccgcgtaggctggcagatagtgcgccgccccttcgacctcgagataaaccgccgttttcaggccggagaagcggccgacgcccggcaggtttaccggtttatcttccgggatgacctcaaactgcacctgctgcttcaggcgatatcccggcacgtaggcctgtaccgccgccgccatctcggcgatcgacgcggcaatcgcctgctgcgatgccgcttcgctcaggacataaacggtgtcgcgcatcatcagcggcggctccgccggattcagcacgataatcgctttgcctttcgccgcgccgcccactttctcaatggcctgcgaggtggtttcggtaaattcatcaatgttggcgcgcgtccccggcccggcggatttgctggcaatcgaggcgatgatctccgcatagtgcacttttgccacccgggagaccgccgccaccatcgggatggtggcctggccgccgcaggtcaccatattgacgttgccttcggccagattggcctcgagattgaccaccggcacgcagtacgggccgatggccgccggggtcaggtcgatcacccggatccccggcctggcttcccgcagcgcggcgtcgtttttcacgtgcgctccggcgctggtggcgtcaaaaaccacatcgatatcggcgaattccgccatctgcatcaggccgccaacgccctcgtgcgtggtggcgacgcccatgcgccgggcgcgggccaggccgtcggactcagggtcgatgccgaccattaccgccatctccaggtgctgcccgtggcgcagaattttgatcattaaatcggtgccgatattgccggagccgataatggcgactttacgtttactcatcactctcttcctctttggcgacaaaggtcgccgccactgaacctaaaccgtcgatatgggcggcaaaacgatcgccggcggtaatcgccaccatcgggcctaacgccccggtcagcacgatatcccccgcccgcagcggctcgccgaggctggccattttgcgcgccagccacaccgccgcgttcagcggatggccaagacattcgctgccgcgcccgctggagacctcttcctcgttacgggtcatgcacatcgcgcagtttttcagatccagcccatccgggcgccgcgccgggctacccagcacgtaaacgccgcaggaggcgttatcggcgaccgtatcgacaaagccaatcgaccagtcgcgaatacggctgccgaccacctccagcgcgggaagcacccagtcgatggcggcgtacagttcatcaaaggtggtatcggcatgcggcagatcgcgtttcagcaccagggcgatttcggcctccactttcggctgcagcacccgggagaacggcacatcggcgttatcgccgtagcacatgtcggcaaaaagggtgccgaagtccggctggtcaacgcccagctgctgctgcactttaggatgggtcagccccaccttgcgtcccgccacccggcggccgttcgccacgtggtgctgcacgttcatccgctggatggcgtaggccgcttccgcgttgtcaacgccgagcgcatcgcgcagcggttcaatcgcctggccgcggctttccgcctcacgcagacgctgcgccagttgttcaagagataaggttgtcatcagcactcctcaggtacgcgccagaaaatcgagcaccagctggttaaagctctccgcgtgctcccactgcgcccagtggccgcagtcgcgatagatatgcagttcggaaccgttaatgcccgccagcaggcgcagcccggcgtccatcggtacaaagcgatcgttacgcccccagacgatcagggtctgcgcgcggatttcgccgagacgcgggctaaaatccgggaactgcttcgggttggcttccaggctttggacgaaattatccagatgctcccggcgcgacagcatattattgaggcgcgcttcaaacagcgcgtcggtcaaatcgcgggtatcgaagacaaagatgttcatcatctttttcaggttttcgatggtcggctcacggtacaggccgttcagcagcttgatgccttccgtcggcatcggcgtaaacaggctcatgccgccggttccgccgcccatcagcaccagtttgccgacgcgctccggccagctgagggtaaaggccaccgcgctgtgtccgcccatcgaattgcccagcagatgcactttgctgatatccagctggtcaatcacgcttttcagcaccctggcgttcaggtcggaacgggagccgcggttgacgatagaatcgctttttccccagccggggcagtccagcagaatgacccggtagcccgcctcgaccagcgggtcgatattgcggctaaagttggcccagccggtagccccggggccagagccgtgcagcaggaccacggtttcgtcgccctcgccgcagtcattaaaatggatgcgtaatgtttctccgccctcttccacgctgaggaaacggctggtggcggcttcagtttgcggttggtagctcatcatatactcccgttaattcagttctgcgcggcggcgctcagcgagccaaatccggcaatccactcggggattggtcggtaatagcggccttcgcagcgccagcggccaaatgcggatagcgcggcaaaggcggccacccaggttttaatttcgtgcgtcgatttcccggccattgccgacagctcttcgttactgacggcatccagctccgccagccgcccctgctccagcaggctcataaagcgggtatcccagacggggttgagcggatagagcgagttctggtcctcgataaactgcttcgccgcgctgatgacccgctgctggcgcagttcacgctcgtccggcggcagctgcctgccgctgcccagcagccggtcgcgcatatgggcatcggccttcgccagctccggtaccggcggctgatgcgacaggccgccggagccgaggattaatacccgtttattgagggtggtcaggaagcggccaatggcttcgcccagcatgcgggtgcgctgaaagcccggcagcggcgacgccacgccgttgataaacaccggcagaaccggcagggtatccagcccgccgagcaggaactccagcggttgcgcaaagccgtgatccacctgcatgcagtaggagaccgccagatcgatgccctctttcatcaccgcgtgggcgcaggcctccgccagcgccgtcggcaccggcagaacgccgctggcgctgctgaagtcgccgatagcggtcgccccgatgcctaaacagaacggcggcatcacatcgtagaaaaagccgttgtagtgatcgggagcaaacagcaccaccagctccgggtcgaaggcggcaatgcgcgcccgcgcgtcggcgatggtgccgttcacttcgtccagcaccgcctgttccgggtcaacatagcccaccagcggggtatgggagaggcaatgaagatatgcgttcatatcaggccacctgttcaatcgtggttgccgcctgcgcggaagccagctgcatcttgctcgccagcgcgtcgagctttttgctcagggtttgcgggatggccacggtggcgacgaagcggtccggacgcaccacggcaatggcggtatcgtgctgcgcgaaccagcttttcaggcggttttgcgtatcgccgacgcggataacgccgggcacgttgtcctgatcgcaatgaatctgcacctccggcaccacctggataaagcgcaccccgaccgcgcgccagcgggcaatttgctcatcgttgagcccccactgcggattacagccccaggcgataatggcgaatctggcgccaatcacctcatcgagcagcgtcacctgcccgttttccagcgtcaccttcggctggataaacattttgccgaccggggacgttttgctttcgccttccgccagcagcgcgccgtcgcgatactgcggcatcggcttgaaacgcatttcaaggaagtagcgtttaaccggcggcagatagttgagcagccacgaaacgccgtcgcgcaccgcgccgtgccagcgtttcggcggcgccaggacgttgccggcggtgaccgacaggtcgatcatcgctttggcgtgatcgcgccgctcctgctggtagctgtccagcagcgcctctccggctttgccgttcaccaccagcgccagcttccaggccaggttaaaggcgtcgcgcataccgctgttgtagccctgcccctgccacaccggcatgatgtgcgccgcgtcgcccgccagcagtacgcgatcgacgcgaaagcgttcggcgatgcgcgcgttgtgggtgtagacgcgctggcgaatcagctcgacgttatccgggtccggcagcaccttgctcaatagctggcgcatcttgcgcggctcgctgagctgggcttcggtttctccgggcatgaccataaattcgaaacgccgtaccccgtgcggcagcgcggcggagacgtacgggcgcaccgggtcgcagcacaggtagacgtgcggcgtcgccagcggatcgttggcgatatcaataacaatccattgattcggcgcggttttgccttcgaagggaatattcagcgcacgacgaatgaagctggctccgccgtcgcaggccaccagccagtcggcgcgcacggtttcccgctcgccgtcgctgcctttgaggttcagggtgacaccgtcactattctggctaaaggcctctacttcgcgggaaaacaggcagcgcacgtgggggaaacggctgaggccgtcatacagcaccgcgtccacctgcggctgaataaacgcattgcggcgcgaccagccaaactcgtcggtcatcggctgaatatcggcaaagcagcgccctttcggggtgagaaagcgcatcgcgtgccacggcgtagtatgcggcagcacgttgtcgaccagccccaccgcctgcatcgcccgcagcgcctcatcgtcgataccgatggcgcggggataatcgatcagcgactcgagcttctcaatcagcacgacgctgacgcccatctgcccgaggtagttggcgatggtcaggccaaccggaccggcgccggcaatagcgacctgcgcgctgtgctgtaccgcgggttgaatatcaggattggatgttgtcattttcaaaacctcacgcttcggacaaattgccgtcaccgcacaaccttcagcagggcgacttgttaaataaatgtgaatttatttttattgtgaggtcagtatagggtcagtgatttgcgctacaatcaaaacattaccggatgtgcaccaggtgcacatgattgtttataatgatttttatagaggacgcatgaacgaaaacgcttcggcagattacaaaacggtgcgcggattgagccgcggattattgttattaaatttgttaaataaattcgacggaggcgcgacggtcggcaccctggccgagtttagcggcctgcatcgcacgaccgtcaggcggctgctggaaacgctacaggacgagggttacgtgcgccgcagccgctccgatgacagctttcgcctgacgattaaagtgcgtcagttaagtgaaggatttcgtgacgaacattggatttctgccctcgccacgccgctgcttggcgaactgctgcgcgaggttttatggccgaccgacatcaccaccctggacgtcgatgcgatggtggtgcgcgaaaccacccaccgcttcagccgcctctccttccaccgggcgatggtcggccgccgcctgccgctgctgctgaccgcttcgggattaacctggctggccttcgcgccggaacacgaacgaagcccgattgttgagatgctggccgcccggccggaagcggagtatcagctggcgcgcgagccggaaaagctggccgccatcctcgaacgcacccggcaaaacggctacggcgaaaactttcgcggctggcagcaggaggagaaaatcgcttccattgccgtccccattcgccgccagcagcgggttatcggctgcctgaacctggtctatatggctaaagccatgaccattgaccaggcggcgcaaaagtatctcgcctcgctgcagaaggtcgctacccgcatagaagaacggatgtccgatgaagaggtgttttaccaataaccttgtccatagggggtaaatcgcccgccagccattgcgcccggcttcgttatatattttaatatacagcgattcttcctttgccgctgagcccatcatgtccagacatccgcgcgttttctttgctatggcgctgttaagcgccagcctgtttgccggtcaggcctttgccgaccgcaccctcaccgaccagctgggtcgtgaagtcaccctccccgaccacgtcacccgcgccgtggtgctccagcatcagaccttaaacctgctggtgcagcttaacgccgctgacgacgtcgtcggcgtcatgagcagctggaaaaagcagcttggcccgcagtttgcgcgctttatgccggctattgagacactaccgatgccgggcgatctgacgcaggtcaatatcgagagcctgctggcgctgcatccccaggtggtgttcgttgccaactacgcgccgcaggcgatgatccagcagatccagggcgccgggatcccggtggtggcggtctctctgcgccaggatgccgcgggtgagaaaaacaaaatgaacccgacgatggccgatgaagagcaggcctataacgaggggctgaaacaggggatccgcctgattggcgaagtggtcggccgtcaggctcaggccgaagcgctgattcaatacaccttcagcgcgcgcaggctggctaacgcgccggttgccgatatcccggaaaacgagcgggtgcgggtatatatggccaatccggacctcaacacctacggctcgggcaaatataccggcctgatgatgaagcacgccggggcgctgaacgttgccgccgccagcgtaaagggcgcgcgccaggtctcgctggagcaggtgctgcagtgggatccgcaggtgattttcgtacaggaccgctacccggaggtggtcaaacagatacaaaacgacccgcagtggcagagcattgacgcggtcaaaaatcaccgcgtgtggctgatgccggaatacgccaaggcctggggctacccgatgccggaggcgctggcgatcggcgagctgtggatggcgaaaaaactctacccctcacgctataacagcgtcgatgtcgaggcgaaggcgcgggagtactatcagcgtttctaccgcgtgaagtggacgccggatgcgtagtcatcgtcatccggccctgctgcaatgtaccctcgcgctggtgacgatcgtgattgcaatcgcttcactctgcctcgggcagtatccgttaagcctggcggaagtttttcgccagctagcgcatctttctcccctcgacggcgtcgccggccaggtggtgtggtcggtgcggctgccgaggatcgtgatggcgctgctggccggcggcgcgctggggctatgcggggccaccttacagggcgtattccagaatccgctggtggacccgcatatcatcggcgtcacctccggttccgccttcggcgggacgctggcgattctgctggggctgaacgccgcgctgatgatggcctcgacctttctcttcggccttgccgcgctgatgctggtctatctgatagccgcgctgcaggggcgcgaaagcaccctggtgctgatcctctcaggcattatcctcagcggcttttttgccgccctggtgagcctgatgcagtacctggccgatagcgaagagacgctgccgaatattgttttctggctactcggcagcttcgccaccgccagctggcacaaagtcctgctgatggcgctaccggtagcctgcgccgcgatggtgctgtttaagctccgctggcgcattaacctgctggcgctggaggagaaagatgcccgcggtctgggggttgcggtgaccgggctgcgtcgcggggtgctggtgtgctgcgcggtgctggtcgccgctcaggtggcggtcagcggcagcatcgcgtgggtcgggctggtgatcccgcatctggcgcggctgctggccggcgccgatcaccggcgtcttctccctaccgccttctggctcggcggcggttttatgatcgtcgtcgatgacctcgcccgcacgctgatccaggccgaaatccccattggaatcatcaccgcgctgcttggcgcgccgctgttcacctggctgctggtgcagtcgcgacgcacaggcgcgcgctgatgaccctttccctacagttaagcgacctgctctacggccacagccgaccgctgttcgcaccgctgaacctgcagtgccgttccggcgatatctgggcggtactcggcgctaacggccgcggcaaaagcactctgctcgataccctgaccggggtactgacgccgatcggcggtgggtttacctgcgcgggcggtctcgccatcgtgccgcagcattttcgcccggcttttggctggcaggtgcgcgacgtggtgctgatgggacgggcgcgccacgttaatctgttcgctcagccaacagcggaagacgaacgtgaggtgcagaaggcgctggcgcagctggggatcgcggcgctggccgacaaggtgttttgcgcgctgtccggcggccagcagcagctggtgcttatcgccagggcgctggtgggcgccagccagaatatcctgctggatgaaccctgctcggcgctggatctggccaaccagcagctggtgctgcagctcatcagcgacctggcccatcgccagaagcgcacggtgctgtttaccacgcacgatccgacccacgccctgcaggtggcgaaccagaccttgctgctgctgcccgacggtgaatggctggcgggagaatcagccgccgtgctgacggaagcgaatcttcagcgcgcgtatggtttagcggtacgcaaagtccatccccccgggtcggcgctgccgctgctggctccccagtttacgattcgtcgctgataggcaaaaaaccggcgtctttcagtaagcgctgcccctccgcgccgaggataaagcggcacagccgctgcgccccggcgctctgttcaatctgcgccagcaggtagtcgcagcgaacattccacgccggcggaataagcagcgtgcgcagatcgctgcacgccgccatctgcgcggcgtagtgcgcatagccgataaacagatcggttaagttttcacggatcagccacgccccggcgatttctcccgccggcaccggcagcgagtctcggccgcctaccagcggccgcgcgcgcgccatgatggcggcgccgacgccgggacagcgctcttcaatgtgggagaaaagctgccaggtgtagtcgcctgaagggtcgcagcccggcgttgaggttgccaggcgtaggtccgggtcgctgagcagcgccagccactcccgcgtctcggttgttgcgccgtggcgggcggtcagcatcagctgattccgggcgaacagatagcacgccccggccagcccggcctgacgcagcgcctgcggatgttggctattggccgaggcgaacaccgagcacggctctccgccctcaatgcgctcgcgcagcagccctgccggaccaaaatggacctcgaccgggatgccggtctgttgctgaaagcgcgccagcagcggaatgaaagcgcttttcaggcttcccgccgccagcagcgttagggagggagtcataagaaccatcgctatatagtcataaatacagcgctataataacgcaggttcaggtcatttcagtagcgaatttccgccagttcgcgcagctgttccggcgtcgccaccggcaggttaaagaagcgcagataggccgggatcatttcaaacagcatgtcggtgccgcgctgaatggggcagcccgccgcctgcgccgcctgcagtagcggagtgaactcctgggccataaccacttcgccgacaaaggtgcccggcgtcaggcgctgcgggtccagcggcagcggatcgccctctttcatccccagcggcgtggcgttgaccaccagatcgtgcccctgcggatcgcgctgcatcagcgtaatgtccagccgaggatagtgctcaagcagacgcccggccagcgcttccgccgtctgcgaacagatatcgtacagcgtcagggcgctgacgcccgccgccgccagcgatgcggcaatggccgagccgacgccgccgctgcccaccaccagcgcccgcgcccctcgcgtctcgaaacctttacgcgtgataccgaggacaaagccttcgccgtcaaacatatcgccgctcagcgtgccgtcggcttcgggacgaatcgcgttacaggcgcccgctatcgccgccgttgggctaagatgctgcaccagcccgcaggtggcgattttgtgcggcatggtgaccagcgcgccaataatattggtcatcttaaacagcatcggcacaaaggcggcgtaatcctcaggcttgacgcccatcggcaccactttggcgtcaacctgctgatgagccaaccacgggttgtaaatcatcggcgctttaaatttcgcggtcggatagccaagatgcgctatcagccgcgtatttccactaatcaccattccctgctcctttaacaacgactgcatcacgttactgcgaaagttcgatacgcttgacatcgcccaggataaagacataagccgccacgcccagcagcgctgcgccgccgatataaatcagcgcgtaaaagaagttgccggaggcggcaacaatgaaaccgataatcagcggcgtcaggatcccggcgaggttagcgcagaagttaaacaggccgccggtcagaccgccaaggcctttcggcgcgatgtcggagatcaacgtccagcccagcccgaccatcccctgaccaaaaaaggcgaacgacatcaccagaatcactgccagatcgctggtcagccagttggcggagataatggtgctcgccattagcagaccggcaatgatcggcagcttacgcccgaggttcgccgagccggtggccttcagcagcttatcggagacccagccgccgaacatcacgccgcccgccgccgccagaaacggcatgatggcgaagaagccgaccttaatccacggcatatggcgctcggtggccagataggttggaaaccaggtcaggaagaagaccagcaccgtattaccggcaaactgcccgatgctggcgccgagaatctgccgtttcgccagcagctggcggatcagcggccagctaaaggcggtatgctgctctgcgccggtggacattccgccgccgttgacgatgtgctcgcgctccagctgattgaggtgtttatcctcatgcggctcgcgatagcagcgccaccacaccagcgcgaacatcacgccggcggcgccgacgctaataaacagcgcgcgccagccaaagctgcccattatccagaacagcagcggcgcaaaacaggccagcccgagatattcgccgacggtatagatcgccgtcgccttggcgcgctcctgctgcgggaaccaggcgctcaccacccggctgttcaccgggaaacagggggcttcgctgacgccgaggccaaaacggcacagcagcagggttttcaggccgaccgccaggccgtggaacagggtgaatagcgaccacagggtcagcgccagaaaataggtgactttattaccgaagcggtcaagaaagatgccgccggggatctgcgccagcgcgtaggtccaggcaaaggcggagaatacgatgcccatcatcgcggcatcaatacccagctctgcggtcagctgcggcgcggcaatccccagcaccgtgcggtcgagatagttgatcatggtgccgaccgccagcagcgcaaggataccgatacgccgccgggaaggccgcgcgccggacgcggcggccgccgtcgtgtgattatggctataagagttcatagtcgtttcctgtcatagggtacagccggatgttgttattgtgtttgcgacgttgggttgtgaaccatttgctacattactaggtgtactgcattgctgacaagcgtacagctgcatttacagcaccataaagtgcgtaaccgttgcgccgctcggtcagttcaaagaaaaagcgtccggcagaaaacgggcgggtataaaggtgcaggaattcaccgccgcttccgtcacgatcgtaaagaatttcattattcttcaacaggttgacctgaacatcctcgccaaaacgggccaacagatcttcatagtagttcgccgggatcggcagcgcgttgaccgcaaccggtgccaggctggcgagcgtggagggtaaatcgtggcaggcaaacgccgcgtgctgtaaacctgctccctgataacaggctaccgaacgggcaatttgcgtggcgcggctttgcgaaatattgagcgcgagacgaatgtcgccctgcggactgcgcaccgccaggctacgcaccagcccgtaaggatcgggcagggtctgctcatgttcgagcgtaaagccgaatacggtgcggaaaaagatgatccagttatcgcggctgtccgcttccatgccgagggccagatgatcgataccccgataatcgttgcgcggcgtgacgttcgcgcgcagatgaaaatcgcgggtgtagatatcgtcccccatctcaatcagataaataaggctgccgtccggggcgcaaaccgccgggatggggctttcgttcggcccggcatcgccctgccaggtggcgtagcctaaggcgcgggcgcgttccacgatcgccgcgctctggctgacgcgcagcgccatggcgcagagggaaaccccgtgacgctggtgaaaatgatcggcccagctatgcggctgggcgttaaccaccaccctcgccccgccgttgcgccagagggcgacgcgttttgagcgatgcgtcccctcttcggcaaagccgagctgcgtcagcctgtgtccgagttcgcccgcctgcgccggcgtggcggcaaactcgataaactccagcccggcgtagaggggcagttcagcggaggaaaacagcggcgcccggctttccggcagccgctgacggacctgctcttccagccacagcagcgcgcgatagccatctttcgccgtcgcgccgttgggcgatgcgcggaagctgtcgttaaagatctccagcgaccaggggccgcagtagccgcggcgggtaagatcgcaggcaaactccaccaggggcagctgcccctggccgggaaaacagcggaagtgacggctccattcgaggatatccattttcatcagcggcgcgtcggccatctgtacaaaggtgattttttccagcggcacgtccgccagctgcgccagcgtatcgccgcgcgccagcacgtggaaactgtcgagcacgatgcccagcgccgggctatcgacgcttttgacccgcgcccacgcctgatgccagcggttgacgtgggtgccccaggccagcgcctcgtagccaatcgtgatgtgttcctgctccgccagcgcagcaagggcgcgtaagtcggcgacctgcagctcgacgtcggcggaacagtccggctgaacgttgctgcacagcagcagggtgtcgcagcccagctcgtgcataagcgcaaatttgcgcctggcgcgttccatgttggcggcaaactgggctcggctggcgccttcaaaatcacgaaatggttgaaaaagcgtgatttttagccctaaatctgccgccaggtggcggatatcggccggcgtaccggtataatagagcagatcgttttcgaagatttcgacgccctgatagcccgccgctgcgatggcatggagcttttcgggtaaggtaccggagatcgagacggtggcgatggaacgcaacatagagtcctcgggtcattagctgacttagtgacctgaatatgtatcatttggttcaaatgcgccatgattggttgcaaaattgtgatcaatatgtgtattttttgcatctcaagaaaaggagccgttatgtccgtcgttgctcatgatgaagcgcagtctctgaaagagcggatcttcgccgccgccattaccgttttcgccgagcatggactgtcaggcgcgcggatggagcaaatcgccaccgaagcgcagaccaccaaacgcatggtggtctactacttcaagaccaaagagctgctttatcaggccgtgctgcagcacgtctacgcgaggatccgcgaaaccgagcagcagctcgggctggaaaacgtaccgccggtagaggcgctggtgcagctggtgaagtggagcgtgcgctatcacgccacgcacgctgactatatgcgggtgatctgtatggaaaacatgcagcgcgggaaatggctgaaaagttcaggtcagctgaaaccgctgaaccgcaccgccctgtcgatcctggaagatattcttcagcgcgggcagcagcaaggggtgtttcaggcagggctggaagcgcgcgatgtgcatcgattaatcagcagctttagcttctaccaggtatcaaacttttatacgttcagcagcctctacctggacgatccgatgccggctattgatgatgaagcgatggtcgcccatcactgcgatattgccgtcaaggcggttattcgctttgtgatttcctgaagcgcgcgggaagcgcccggcggcggctagtttccggaaagcgcatggaccaccttctccatcgcttcctgcgtcagcgcggaacgtttgattttcgggttcgccagggcggtacgcaccacgccggcgataacgatatgctttggctcctgacccaggtcgcgcatctccagcacgactttgcccactacgcggcacatttcctgatacagcgcctcatctttggctgtgtttcccattctatttcactctcaatttttcattatcaatcaaatcattattgatatatttcctgagtaaatcaaaccagctccgcgtttgtgcctcagagaccgcttttccctggcaaacttgtgaataaacccgcgtttccgccctctttatcttgtcaggtgatgaaaaaatgtgttgcgcataagcgtaggattagtttgcattttgttaagtatataactatagaaatgaaacatggttttcattttcttttttggatttggcaacgtataatgcccaacaaattcttattgaatggtttcagcgcattggattgcatgactaaacgcataacacgttgcctcttttcatgggctgaaccgccagcacacattcttctgcacgctcttttgttgtcacctatccttagagcgtggcatagcagctttcgtaatacaggtttaactctgcggcagtgcgcccacggagtcagattccccatccctatccttcacaacttaaagattaaactgtcatgaaaaagaccaaaattgtttgcaccatcggtccgaaaaccgaatccgaagagatgttgaccaaaatgctggacgctggcatgaacgttatgcgtctgaacttctctcacggtgactacgcggaacacggtcagcgcatccagaacctgcgcaatgtgatgagtaaaaccggtaagaaagcggcaatccttctggataccaaaggtccggaaatccgtaccattaagctggaaggcggcaacgacgtttctctgaaagcgggccagacctttaccttcaccaccgacaaatccgttgtcggtaataacgaaatcgttgcggtgacctatgaaggtttcaccagcgacctgagcgtcggcaacaccgtactggttgacgatggtctgatcggtatggaagtcaccgctatcgaaggcaacaaagttgtttgtaaagtgctgaacaacggcgaccttggcgagaacaaaggcgttaacctgccgggcgtgtctatcgctctgccggcgctggccgaaaaagacaagcaggacctgatctttggttgcgaacagggcgttgactttgttgcggcctcctttatccgtaagcgttctgacgtcgttgaaatccgcgagcacctgaaagcccacggcggcgagaagatccagatcatctccaaaattgaaaaccaggaaggcctgaacaacttcgacgagatcctcgaagcctctgacggcatcatggttgcgcgtggcgacctgggcgttgaaatcccggttgaagaagtgatcttcgcgcagaagatgatgatcgaaaaatgtatccgcgcgcgtaaagtcgttatcaccgcgactcagatgctggattctatgatcaaaaacccgcgtccgacccgtgcggaagcaggcgacgtggctaacgccatcctcgacggcaccgacgcagttatgctgtccggcgaatccgcaaaaggtaaatacccgctggaagcggtcaccatcatggcgaccatctgcgaacgtaccgaccgcgtgatgaccagccgtcttgaatacaacaacgacaaccgtaagctgcgcatcaccgaagcggtttgccgcggtgcggttgaaacggctgaaaaactggaagcgccgctgatcgttgtggcaacccagggcggtaaatccgcgcgcgccgtacgtaaatacttcccggatgccaccatcctggcgctgaccaccaatgaaacgaccgcgcgtcagctggtgctgagcaaaggcgttgtggcgcagctggttgaagatatctcttctaccgatgccttctatatccagggtaaagagctggcgctgcagagcggcctggcgcgtaaaggcgacgtggttgttatggtctccggcgcgttagtcccgagcggaaccaccaataccgcttccgtgcacgtgctgtaataatttacaggttaattagtatttcctttaaaagcgcctcttcggggcgcttttttttattctggcactagccgctattaataaaaatgcaaatcggaatttactatttaatgcgagattatctaagatgaatccgatggaagcgcgctgttttcactcgcctttttaaagttacgtgatgatttcgatgcttctttgagcgaacgatcaaaaataagtgcattcaggtaaaaaatattctcatcacaaaaaagtttgtgtaatacttgtaacgctacatggagattaactcaatctagagggtattaataatgaatcgtactaaactggtactgggcgcggtaatcctgggttctactctgctggctggttgctccagcaatgctaaaatcgatcagctgtcttctgacgttcagactctgaacgctaaagttgaccagctgagcaacgacgtgaacgcaatgcgttccgacgttcaggctgctaaagatgacgcagctcgcgctaaccagcgtctggacaacgcagctactaaataccgcaagtaatagtatctgtgtaataaaaatggcgcacattgtgcgccattttttttgccttaccttttcccgcctactgcacccttttcgcttcatctaccggcgtattattctgtaccgacaggctcgacgcggtgcttccgctagccgataccaccaccggatatcctgcccgccgggtcagcgcgcgtttaagctgcgcctcatcaaccgctttatcccccgagaattgatgaaactccgccggaagcgtataggccatggtctgcgcattgctggcctcatccggcgtcaacgggcgatgaacttcaacatagcgcttaccgtccggctccacggcgaacttgaccggctggttgataatccgtaccggcgtcccgcttttcacctgattgaataaagactggatatccgccgcgttcatgcgcatacagccggagctgacgcgcagacccacgctgtccggcgcgctggtgccatgaatcagatattcaccgttaccgtacgccagacggagcgcatagcggcctagcgggttattcggccctgcgggcacgaccggcggcagtttaatccccttctccagcgaacgggcgcggatgcccgccgtcggcgtccaggtagggttcgggattttctgccctatgcgggtcgtcatctccggcgtctccagcccctgctgaccaatccccaggggatagacctgcacctgattgacgcccggcgggaagtagtacaggcgcagctcggccaggttgacgacgatgccctcgcgcggcacgtccggcagcagcatctgcgaaggtatcagcacctgagtacccggtttaggctgcaccggcgcaatggtatcgttcgcttcaaggatcagcatcgccgccgtatcaaaacgacgggcaatcgcctgcaggttgcggtcaccctcctgtaccgtccagaactggttctcaccaatcagacgactgttggcaggaggaagggggtaatcaacggcccaggcggcgtgggacgcgctgagggcgctcagaagggcaatggtgataagagaagcgcgtttcatactgagattccttctttcgctgataaaacgccaggcctgttatgcacgacgggaggcgagcctcccgtcgtgcataacagaatgaaatctactgttttattctagctaagatttgctgctttcgcgcgaattgcgcggatcatggcttccagtccttgcgaccgcgagggggtaaggtgctgcgtcagggccattttttcaaaccacggacgcacgtcaaacgcggtgatatctttggccgtcatctggtcatagaggataaacaccaccgcgataaggcctttgacgatggccgcatcgctgtcgccgcgaagcgcaatcgcgccgctctgctcctgcgtcatcacgatccacacctggctctggcagccctgaatgatgttctgcgcggtgtgttcctccgggctcagcggcgccaggcgctgacccagttcaataatatagagatacttctcttcccagttcgcacaacggctaaagttgcgcagcagtttgtctctgtccggtaacgccgccatagttgcttcctttagcttaataatttgtggatccgctgtagccccgccaccagtcggtccacctcctccgtcgtattgtacatcgccagcgatgcccggcacatggccggcacgccgtagaacgccatcagcggcatggcgcagtggtgcccggtccgcaccgcaataccgtagttatcgaggaagctgccgacatcataagcatgatgtttgccgagattaaaggcgatcgcccccaggcgatctggcgggccgtaaagggttaaatccgccacgctctccagcgcctgcagcgcgtagcgcatcagggtctgttcatattccgcgatgtgcgtcagccccagcgcgctgacgtaatccagcgccgcgcccagcccgatgatgccgccggtattcggcgttcccgcctcgaagcgccacggcgcttttgcccaggtcgtgccttccgtcaggctgaccgtggcgatcatcgacccgcccccttcccacggcgccatctcctgcaaaatgtcctgcttgacgtagagcacgccgatgccggtgggaccgtacagcttgtgggcggagaaggcgtaaaagtcgcactccagcgcctgcacgtccaccggatggtgcatcaccgcctgcgcgccgtccaccagcactttggcgccgtgctgatgggccaacgccgtcagagcggcgatgggattttcggttcccagcacgttcgatacctgggtaatggccagcaggcgggtacgctcgtcaaacaggccggggatcgcatccagctgcagcgtaccgtcctggttcagcgggatcacccgcagctgcgcccccactctggcgcacagcatctgccacggcacgatattggcgtgatgctccatcgcgctgacgatgatgttgtcgcccgcgccgacgttggcgtttccccagctgttcgccacgaggttaatgccttccgtggtgccgcgaacaaacaccagttcctccgccgagcgggcgttgaggaatgtcgccgcccgctggcgcacctgctccatgctcgccgtggcttccgcgctgagggtatgaatgccgcgatgcaccgccgcatagccgtggcggtaaaattccgcctcagcgttaatcaccgcttccggcttctgcgcgctggcggcgctgtcgaggtaggccagcggctggccattaacctcgcgattgagaagcgggaaatccgcgcgcacgcgttccacagaaaatgtcatgccttacctcccggcaaacgctggcctatacgcgccagtatctgctgcctgagcgcctcatcgtcgatcgcttccgtgagctcggcggcaaaggcgtaaagaatcatctgctgagccgcctgctgcgtaatgccgcgcgagcgcagataaaacagctgttcgtcatcaatacgcccgatggtcgcgccgtggctgcacttcacgtcgtcagcgtaaatctccagctgcggtttggtatccacttcggataagcggcccagcagcaggttgttgttggtcatctggccgtcggttttgatcgcatgctgcgcgacgttaatcaggccattaaacaccgcccgccctttatcgttgacgatggttttatgcagctggcggctgttacagtacccgacctgatgatcgagccaggtgcgactgtcgcagacttcgccgttgaccggcatcgccagcgagttaatccgcagggtgctgttttcccccttcagctgcgtgctggtgtggtggcgcagcaccgaactaccgagcagaaaactgctgctgaaagcggaggcgtcgcgcccgagcgccaggtcgttatgggcaaaatggtagctttgcgcgttctcaaacgccagcttgatatgctgcaggtgggcgttatccgccacggtcatcgtcagccttgcgccggtaaagtggcgctcatcgttaaggctcagatagtgttcgatgatggtcgcctgagcgccgctctccagcgccagatggtggcgatagtgggcggtgttcatttcatcgctcgccagcccgcgcgtcaggtgcataatcagcagcggtttatccgggcgctggttgcgcctgacccgaatatgggtaacggtggtcgccaggctttcggtcaaatgcagaaacacttcaggctgaacggcgtcaggcagctgctgacgctcgttatccacctgcacttcatagccgctggcggccagatcgtcgctcaggctcgcgctaaactgaccgtcgacaaacaccagccgccatgcctctaccggtagcgccagttcgtcgcgccgggccgccgtcagcgtctgcggctgagcggcgacaaaggtctgattcagtagcgcgtccagcggggtatatttccagttttcgtgtttacgcgttggcaaccccaggcgcagcagctgttgcaggtgctgatgcgcctgcgggctgcgctgcccgctttgggactcaaacagatggtgccactgctgcagcgcgttactgctgttcggtaagccagccatagccctgctcctccagttgtttgaccagagtaaaatcgccggatttgacgattcgcccctggtacagcacgtggacgtaatccggcttgatataatcgagaatgcgctgatagtgggtgacgataataaacgagcgcttgccatcgcgcagggagttgacgccgtcagagacaatcttcagcgcgtcgatatccagcccggaatcggactcgtccaggatgcacagctccggttccagcaccgccatctgcaggatatcgttgcgctttttctcgccgccggagaagcctacgttaaccgagcgggtcagcagatcttccggcatcttcagcagctttattttgtcttccatcaggtcctggaagtcaaaacggtcaagctgttcctggccacgatagctgcgcacggcgttgagcgcggtttgcaggaaaaactgattgctgacgccgggaatttccaccggatactggaaggccatgaagatgccttcaccggcgcgatcttcaggggagagttccagtaaatctttgcctttaaacgccacgctgccgccggtcacttcatagtcttcacgcccggccagcgtagcggagagcgtacttttcccggagccgttcgggcccataatggcgtgcacttcgccggggcgaacctccagatccagcccgcgcaggatcgctttgtcttcaacggcgacctgcaaattttttatacttaacatcttatttcctttgttatcagccgacgctgtgttcaaggctaattgccagtaatttttgcgcttctacggcaaactccagcggcagctctgagaagacgtctttacagaaaccgttgacgatcatcgaaatcgcatcgtcttcgctgattccgcgctgcaggcagtagaacagctgatcttcgccgatacgggaggtggtcgcttcgtgctccagctgcgcgctgttgttgcggcattccacgtacgggaaggtatgcgccccgctgtccgggccaatcagcatggagtcacactgggtgaagttgcgcgcgttggtcgccgtcggcatgattttgaccagaccgcgatagctgttctggctgtggccggcggaaatgcccttcgagataatcgtcgaacgggtgtttttgccgatatggatcatcttggtgccggtgtccgcctgctgatggccgctggtcagcgccaccgagaagaactcgccgatggagttatccccgcgcagaatgcagctcggatacttccaggtgatcgccgagccggtttccgactgggtccacgacattttgctgttctcgccttcgcacagggcgcgcttggtgacgaagttgaggatcccgccggtattgttgtcgccggggaaccagttttgcaccgtggagtacttcacctcggcgtctttatgaataatcacctcgaccaccgccgcgtgcagctggtagctatcgcgtaccggcgccgaacagccttcgatatagctcacgtagctgccttcgtcggcgaccagaatggtgcgttcgaactggccggttttttccgcgttgatgcggaaataggtcgacagctccatcgggcagcgtacgcctttgggcacatagataaaggtgccgtcggacgccaccgccgcgttgagggcggcaaagaagttgtcgttgcccggcaccacggtgccgaggtatttcttcaccagttccgggtgatcgtggatcgcttcgccgaaggaacagaaaataatcccctgttccgccagcttttcgcgataggtggtcgccaccgaaaccgagtcaaaaatggcgtcgacggccacttcccgtccttcccgcaccggcacgccgagaaggttaaacgcctcttcgacttcgctggtcagaaacgcgctggaccccgtttgctgcagcgcgccgggctcagaggcgcaggcgtcatcgcagttgccgcaggagggcgctgaataatagctgtaatcctgatagttcagcttgtcgtagtgcgccttcagccagtgcggctcttccatcgcctgccaggccttaaacgcgttcagacgaaactccagcatccattctggctcattgcggcgcgcagaaatcgccctgaccacctcttcatttatgcctttcgccagctcatcggtccgtagctgagtgaaaaagccctctttatagttgagtggcccgccgctccaggttttgacatcgtcagttgcttcagtattacgagacatagttactccgcctgaacgccaaaactttcgccgcagccgcattcgtgctgggctttagggttatgaaatttgaagatttgatttaagccttcgcgaacgtaatcgagctcggtgccatcgataaacggcatcgcctgcagcggcgcccacagcttcgcgccatcgcgctcaaataacagatcgtctttcgccggttcagcaattagctcgagaacgtagccaaaaccggcgcagccgctggttttaacgccaagccgcagcccctgcatatccggctgtttgcggaccagatcgcgaatatgggcggcggcggctggggtcatgaccagcccacgccagctaaaatcttcgggattgaaagttcctgcatgtgaattcatcgctctacctcataggttgacgccatcgggccatatcgctatgttagtgataatgattatcacttcaacccatgcagagaaggggtatttccccattcagtgctttttataagcatagaccctgacagaagagatatcggagatggaataaattgttcaatgcattgattaataatgcatttcagtgccagaaaggtagaaattgcaggaaagttaaaatatgcatcggaaatacctatttttgagatagcgaatttgcgttgcgtagaccccaccgtgaagggcaaaagagtcacaaccgcgtcctgcgggtaaaaaggagaaatggcggacgttatctttcccggtcatgaggcaaaaagaccgcgctaaccacggaaattaaaagggcagcgccatggcggcgatggaggcgctaccgcgtatcgctaaacggatgcccgtttaattgtactgcagcgtcatgaccacaacagcactaatagttccgggcgtcgcaccgcctgacaccgattttaccgaggcctgcatagccagggttgcggttctgtcagccgcgatattgtgggtgatgctggaacccgttcccttaagcgcgccgctgcccgcttcactcatcgctaccgccacgttggtggccgtaccgctattcagataatagtcaggaccggcaagcggatcgggagcgccggtgaaggaggccgttacgctgcgcgttcccgccggacagttggtaaacagcaaattaaaggccacagggtcggaggatgacccgggcgtggccatgttggttgcctgaatatcgcccagattgacatcgaggttgctgtttcccccattgaatatacagggcgaggcgacaatatttcccgtcacccccatcgtcacgctatcggcagaaaaaacgttccagcacagcaacgtcagaataagcaattttttatggcgtattttcattttttcacccgttactggtacgtcaaattaagcgtggcggtcgcatttgccgagccggattcaacggaagttaaggtctgataataacgggccgtcaacggcagcgtttcttgcccgcccgatgaccgttttaataacaacgggctattgatggccaacggcgcgccattatataaaagctgcacgccaacgccctttgccgtaccggcgctgccctgccccgttaatgccattacgctggtattggcgctgtcgggattttgtacgccgctcagcgaaacggtgatattggtgccggcgttgcagcttaaccccagattttgcgtattctgcgcgccagcgggcgtggtgcctaccgtcgagccgaacgttgaagcgggaatatcgccaatgatgaagttcaactgaggcgtagtgatactgcaggccagcgcgttgattgtcccatcggtgagtgttgtggtcaggccatcgcggtagacgccgtcgctgccctggagcgtcaccaccccgatcgttcccggcgttaatgcgcctgatgacacctggccggtaaccacgagctcaattctgccgccccaccactccacgtatgaggcctgcgcctcataggaaaatgtattgcttgggttttcaaagtaattcccggaagagaagcgaataccgataccatcgacattagtggtgtaaacatgattaccgtagctgctcggattcccaccaagataccgcatgctgaatccaagcattaacggattagtacaaccggttaaataggaggtggttttcgtcgcattctgagaaaaaataacggtcccgaccggcgcatcacgcggtacggtaatcgttcccacggacagagtggagatctgcggggtaatggtggtgcaggttccggcacgcgcgttattccatccggctatcaagccgagcaaaataacagagtaaatcaatctcatgtttaacgttcctggtgacaactggcgctaacttctgttattccagcgtaggttgattgtttcggcaggctgaaatcagcacggcactgttggctggactcgcgaccccacgtgacgatgattgccccctgctcgcgcattccgcttaaaaaaacctggccgcgatcgccaacgataaagctgctcttattatcatccgcaagcgtcaccaccgccccgaacggcacgaagcggttattgtcggttaaggtcatcaggaccctgcgccccactttggaaagataatcggcgcgcaccaccgcacctcgcgtcggggtaaccgtgtcggtgtttatctccagctctacgtcctcaggcatattttgcggatcgagcgtcaggtcgttttttcgatagacggaaatattgctgacgaccgtatatccccggtagtccgtgcgcgcgccgggttggttgcgaatattcacgccgtgtgcgccgggggcttttatcagggcattggtttcaccgagcggttgggaaagcgtgatgccatcggcgtgggcgataacgcccccctgcagaccataattaagacgctcgctgtttttgtcgtagctataccccgccgtcacttcgccgtacgtccctttatagtcaccgttcatattgccggtgtaacccacgccatccgtaccgtaaccctgctggacgttccagttcagcgagttgttctccagcgcgacgccgttcatgccgatattatgcgtcgttccaccattcttgctggcgttcatgccatagctggcccacgtttgcgggaggaatttatccaacggtacgctgacgttaaacgccagcagctggtcgtgggcgctgttactcgcgctgtcgtttgacgtcgcgctaccatttttgctgtatgtccaggtcaggccgtagctgatattgcgccagtagttgttgtatccgacgctccaggaagccatcgacctggcggagttccagtaatcttccctcgccgcgctgagggttagcgatcccagttcgcggctcagcgtctggctcatcgtcagctccgcgcggttacgcctgcggtcctgcagcgcgctgctgtctccatatgaatccagaacttcctgcatcccgtaatagccgctggtggaatagcggtatcccgcaatggaaaagttggtcccggtatcgatgaagtttttgctgtatcgcgctcgccaggattggccgcgcgatttatccgttttatccggcgttgaccaggcctgcgtgacatccgtggagatagcgcctaacgcccccatatttttacccacgccgaatgccagcgactgatatttgcttgactcctgcaggccgccatagagggtaaagccatgctgcaggccataaattgccgttgtctgcccgaaaggggttttatccacgctgctgttatatgaacgatactgcccgccggtgatggcgtatttgaaccgggcttcccgctgcagtacaggcagcgaggcgtagggcagcgtgaagtgctgttcgctgccatcggcttctttaatcgtcacgtcgagatcgcctgccccaccggtaggatacatatccgtgatttcaaaggcgcccggcgcaacgtagctttggtagatctggtagccgttctggcgcaccacgacctgcgcattggttcgggcaatgccgcgtactacgggcgcatagcccttaagagaatccggcagcatgtcgtcatcggatgccaactggccgccgcgaaacggcatactgtcgaacacgtcggcaggcgcagagctgtcgccaacggtaagctgggctttcagaggaataatggcccgctgcgcataggtataaacggtatcccatttatcctggccggaggactcccgtgaccaggtggtatagttgcgaaaacgccagggtccgatattgatccccggacgcaggttcgcatactggctgtcgcttctgccgccctggcccgttttcgcccgagtgttcgctccgctcaggctgtaattgagcaatgccgcagtaatcccctcatcccacatttccggcggtacatagcccctggccggcaggtcgatcgccgcctggggaatactgataaccagccgctgggcgccaaactgaaaatcagcgctggcttgcggaatagcctggagattggcgcaatcactattttctaccgacagctggggaaaaagttcggttttcactccccactgttttaattgttccacgctcagacagggctgtaatacctcattaccacccccgttttttgccatcgaaaaaggaatatcccgggtgtccattaactggtcatcaagaataatatccacatggtatgttcccggcgcctgagagcccgattcaaaagccgataaatccgctttgcccacgccgggattatctaactctaccagggccgtattaaacgaatcactggcatacagttccggagagaaaccggttaacgctatggcgataagcgtagccagacgagcaggtcgcaacttattattttttattgtcatcgctattacctatttaacgctgggcttgccatttactctgggattacaaactggcttgatgtgacggaccggggctgccgtagtcattaataactttaaatgtcagggcattgccggaggccccgtccggcatgcggaatcgggtggtcgaacccggcatgacgtaggtcacctgggcaagcatttttccgcccacggtaatttcattgaaattaatgacgtaaggcgttgggttattaacctgaagttcattgccgcttctttgccaggtgagtttattcgcctgttcctccggcgttgaggcgcgaagcgtaacgggacggtaaatcagcttgatgcgcgtttttacggcaatttgcagggagttcatctgctttgatgccgagggaatcgctttaatatttatccagaataaactttctttggtctgaggcagtgaacctgtcgcgacaattcgctcaatatttttttgtccgctgtcgaggcgatacatcggcggcgtaataataaaaggcgctttaccagaaccaacgtcttgatcatctatccatgactgaattaaataaggtgtcgcatcaggattattaacgctgattgacgcttctttttttgcaccatcgaaaatgatgcgcgtgccgccgataatcaccccggcagtagcgcttgcctgcaccagcgttaacattgttatcgccaggctaattgttctgataaaacgcattttatacctcttaaaacaaaggggccgggccggccccctactgattactgcagaaacttagttgtaaaccactgagaagttcgcgaccgagttagctggaccggcgactaccgtcgcagcggtcgacatatactgcgcatagaaattcagcgtattatcggcggtgctgctgagtatgtagctataaccgttgctgccgtgcagaggcaggtcggctttatccgccgtcatcagattaatggcaacaccggttgcggctccgacaaccgacgagtcaatggccagcaggttggaattgtctggatcgggcgtgccatcaaagcggactttggcattggtaaccgtcaccggacagttcttcaaaataatatcgaatttcgtcgcggcggttctcgaaccggctaccggaaattcagttttataataatcgcctaaaacaaccacctgattctgagaggcgacatcgatgtcgcaggcggcatccaaaatattgccattaaagttaacggtacccgctgctgcgaaagcctgagtcatagataatgcagaacctgctgcaagaatcgcaataacaattttctttttcataacgacacatcctgttttactttatgtacattctggcaaaatatttaataaacgcattttgccattactttaatatattgccgggaatcaatggtatatatcacaccactgcttcattttattaaaaccggattacccctgccgacgagacaaaatttatacaacattttttcagcgcacaatctatttcgcggtctaaatgtagactcagaattaacaaaaataaaacatttaaattaagatattacttaatcactcggaccccggtctacttttggacccgggaagcaaaactaacaaaatcaataaattataaccataacccccccgggtctattattagaccagacgccaatattccctgacatgctgttttttaagataattcccaacatcgatcaaaaaacgatcgcataagttagtgaggtatcttatgaacacgcgaattattcctgaactcggcagcgagccagcagaagtacttgagataaaaccctttaagcacattgagaaattaattgataatatcctgccgtacgccgagagacgtatagtatcgaaaggggagatcgttcattattacgataatgacattcgtcagtgttttttacttatccagggcagcgttgctctgcatcgtcgcggagacgggattgttttaaactcagagtcatcgccttttcttctcggcgtatgtagccagttttcctctgaacgtctttacgtcagggtactggaaacgtcagaaattgcggccgtttcgctggaaacgtttaatcgcgtggtggcccaacagaatttatgggagcatttttcaaagcttctgatctataccgcatcgcgggtttatgagcactgcgcccagatatcgcaaatgtcagcctatgatatcatccgttttcaacttgttgaattaatgcaagagcccgaagctatccggcaaaatatcaccgcggcggcctatatcaaaagtcgcacctatctttcccgcagcggcgttatgcgcatcctggcggagctaagaacgggtaaatacattaccatggagcgcggagtgctgattgacatccaccacctgccgcgaaagtattgattgttcatgtatcttcggagtggcaagagatacgcgcgaggttataataaatccgatctccttcaggattttctgactatgtcatctgcaaatcaacccttccgcggctccccttacgcacaggaatttatttctcatttgcagccctactgcacgacgtaccgaacgggccgcggcgagcagtttgatcttcaggttaacggtcaagggatgtgttacctccttctggaggggacgatagcgatataccgaagaagtgacaacatgatgctttccacggcgctcagtcccgcccttttcggcctcgctaacctgacggacatttactttgatgactattttaaaaccgtcacgccgtgccagattggcgtactcacgacccgtcgcgtcgaggaaatcattaaagagaaggcgctatggggactgctctctaaacagctgatgtttgtctataaccgcctctatcataacgttatgccccagggcacgccaacggcgtacgagatgattcgccagcagctgatcaagctcatggaggaagaggagggttatcgctacagcgtgacggctgaaagatatatcagagagaaaacccggctttcccgcagcggcgtaatgcgcattctggcggctctgaagaccggtggtttcatcgaaatggaagaggggaaactcataaaaatcaacaaacttcctgctaagtactgattatgcggatagggctttcggccctctcgcgatccggcctgcgcgccgaaatgcattcatgcaacaaattctattcgttttcattataagtattgtcatttcacagaaataaagatttattcactgctgactggctcatgtagaatgcgctgctaaatttccttcatcttttacgcaatgtcgccctggcgaccgttcgggaacctgtgtagtactgaattatggatatagaaacagatgtcatgtcgatgtgtatggtcgtgttgttaattattagcgtgttgctcgattaacctcttccccccgtaaaatcagtacgcctcgccgtcgccggacaggccagtctattcgctacgaacccgatccaaatcgaaatcgtaccgttcccccgcgcggcctgacctgccagcgtattccgggataagcgttgagagaggcaatattgccctgtcgggcatggcgcgaatattaaaaaggctgccaacgatggtggcagcctcttcactttatggcattgctggtgcgaagagcgaattagctcctgatcttcctgtagataaacaggacaaccagcgcaccgatcaccgccacgacaaagctgccgaaattaaaaccgtctacacggccaaagccgaagaaagtactaatccaacccccgacaactgcaccgatgacacccagaattacggtaacgataaatccgccgccgtctttccccggcataatccacttggctaaaataccggcaataagcccaaaaatgatccatgaaatgatacccatagctagctccgtcctcttgttaccttgtaaatatctggtatagaaagattagcataaatattaatgatgtttcataaaattatatttagcatatataacttgtcagcgcggggataatggtctacgccctgaacgcgtaccggacaaataatcagcaagcggaagtatcgcgtcgcggataattaaaacctcgggagaggcagcgataagccaggatttttcttattaaaagtgaaactgaaagcggaatacaaaagcagcaaggagggacatttccctccttgctaacttagatgactgcggtcgtcagccgcgacgaacagcaaaggcgcccctgttcatcaaagatgtcgatttgccacacctggtgacgggagccgacgtgcagcgcgcggcacacgccgcgaaccctaccgctgcgcaccgaacggatatggttagcattgacctccagccccaccaccttctgctcgccttcgctacacagatagccggccaccgagcctaaggtttccgctaataccaccgacgcgccgccgtgcagcagcccaaacggctgatgggtgcggctatctaccggcatggtggcctcgatggcgtcatcggtaagggcctcgaagcgaatatccagcaggccgaccatattcccgtcgcccatggcgttcagctgttccagggtgctctgacgtttccaaatcatcccataatctccagtagcgcctgcagcggatggcgtacgccgctgccttcaatacgcttcacctggctacgacaggagtagccggtgaccaggcagcgattacgcggcaggcgctgcatcgcctgctgccaggagagcgcgtagatagccagcgagttggcgtgattcttcacttcatggccgtaggtaccggccatgccgcagcagcccacgttaacgttttccagcttcgcgccaaaacgcgcgaagatatccgcccactgtttggtggaagcgggaagcgccgtgacctcggtacagtggccaaacagataccacgactcgccgccctgctcctgcgcagcggttgccgacagcgcctgcggcagccactcatgcaccagcatcacgcggaaatcgccgcgcttgtcgccgagcacctggttgtattcatcgcgatagcagagcaccagcgccggatcgacccccaccatcggcatgccgagctgggccacccggttcaggaaatcggcggttttctgcgcggtgcgcgcgaatcgcgtcaggaagcccttaatatgctgggctttaccgtttggcgaaaacggcagcagcaccggctggtagcctagcttttcgaccagttgaacaaaatcggcaaccacctgcgcatcgtaatagctggtaaacggatcctgaaccaccagcacccttttagctttctgctctgcgctcagcgcttccagctgctccagcgtggtattcgccgaacgatggccgaccatctgctgcttcagcgacgggacggagagcagcgggagatcgaccataccgatatgcttttccgacagcttgcgcatccacggctgattaataaagaagttgaacgtcttcggcgcatgcgccatcagcggcgcgtaggattcaaccgccgccaccagatgatcgcggaccggccgcaggtagcggctgtggtaaagctggaggaaacgcgaccggaactccggaacgtcgatcttaatcggacactgggtcgagcaggctttacaggccagacagccggacatcgcctccttgacctcatgcgagaaatcgtactctcccttacgcgcgtgccagctattgcgggtgcgctccaccagggtacgcaggctggcgcgtttttccggcagatctttttccagctgattggggtcgatgccgcgatccgccagcaggcgcagccattctcgcaccagcgtggcccgccccttcggcgagtgaatacggtggttgctgaccttcatcgacggacacatcgggcttttggcatcaaagttgaagcacagaccgttgccattacactccatcgcgccgcgccacgagctgcgcacggcaatggggatctgccgatcgaaggtcccgcgcttaaccgcatccaccttcatcatcggcgcatccacgccttccggcgggcatattttaccggggttcagacggttatccgggtcaaacgcggctttaatcttgcgcagctcgccaaacagttctgccccaaagaacgccgggctatattcggcgcggaagcctttcccgtgttccccccacagaaggccgccatacttagcggttaaggctacgacgtcatcggagatgcgcttcatcagcatctcttgctgcggatcgcacatatccagcgccggacgcacgtgcagcacgccggcatccacatggccaaacatgccgtagctcaggccatgaccgtcaagcagcgcgcgaaattccacaatatagtcggccagatgctccggcggcacgcaggtatcttcggcgaagggtatcggtttagcggctcctttggcattccccagcaggccgacggcttttttccgcatcgcgtagatgcgctcaacgccgtccagatcgtggcaaacctgccagccgataacgcccgcttcgccgcgcgccatcagctcatccaggcgctggcacagggttgtcacctggccgtcgatcagttcggcgtcatcaccggcgaactcaacgatattcagccccagcatctctttatccgcaacgtcggtaatgagctcgcttaccgaatgccagacaatatcttcccgcgccagattaagcacttttgagtcaacggtttcgaccgaaagcgccctggcctccaccataaacggcgcgttacgcagcgcggagttaaaggaatcgtatttaacgttaaccaggcggcgtactttcggtaagcgggtaatatccagccgcgcttcggtaataaacgccagcgtcccttctgaaccggtcaggatgcgggtcagatcgaattcgctcatctcgtcattaaagacgtggcgtaaatcgtagcccgtcaggaagcggttaagtttggggaatttatcgataaccagctgccgctgcgctttgcagcgctgatagaccgtgcggtaaatacgcccgatcgccgactgttctgcgcccagcgtttccgccagcgccgccggaatcggctgcgtatccagaatgtcgccgccgatcagcaccgagcgcacgccgagcacgtgatcggaggttttcccatagaccagcgagccctgcccggaagcatcggtgttgatcatcccgccaagcgtggcgcggttgctggtcgacagttccggcgcaaaaaagtagccgtacggtttaaggaactgattgagctgatctttaatgaccccggcttccacccgcacccacccttcttcggggttgatttcaataatgcggttcatatagcgggacatatcgacgatgatcccggcgttgagcgcctgcccgttggtgccggtaccgcccccgcgcggggtaaagatcagtgatttaaaacgttcttccgccgccagtcttgccagcagagcgacgtctgccgtggagcgggggaataaaatcgcatccggcaacagttgatatacactgttatcagtcgccatcgttagcctgtcggcgtagctggtggcggtatcgccggtaaaaccttgttgctccagtacctgcaaaaaattcagcaccagctgaacgacacctggcgcttgagaaatctgtgggatcatgacgctcgaccctgcctgactatgttgtgttgtaagtgattaaacgtttgcgtagtgcacacaactttttatcacatttttttcatatgcgcccgccagaattaagggcaaaatcaggcgcgcgaagatattgatattattatcagtacatggaattacgctgcgtcagccttgtgacgcgactgcaaaggtaaaactttatcatgattaaccccaatcagccccgggacataccgcaagttctgctgtcggtgctgtttttgtccctgattattatttcctgcctgtgggtcgttcagccatttatcctgtcatttgcctgggccggtaccgtggttatcgccacctggccggtgcttttgcgcctgcagcgcctgctgttcggcaagcgcgcgctggcggtgctggtgatgacgctgctgctctttttactgttcgttatccctattgcgctgctggtcaacagcctggtggataacagcacgccattaataaaagtgattaccagcggtaactttacgccgccggatctggcgtggctaaatagcgttccgctgattggcgataagctgtataccggctggcacaatttactggagatggggggaacggcgattatggtcaaaattcgcccctatctcggcaccaccaccacatggtttgttggccaggcggcgcacatcggcaagctgctggtctactgcggactcatgctgctgtttagcgccctgctgtactggcgtggcgaaaaggttgcgtatgggttccgccactttgccacccgtctggcggccaaacgcggcgatgcggcggtgatcctcgccggccaggcgattcgcgccgtggcgctgggggtggtcgtcaccgccctggcccaggcggtgcttggcggtattggccttgcggtcagcggcgtgccttacgccgcgctgctcaccgtggtgatgatctttacctgccttgtgcagctggggcctttgctggttctggtaccgtcaattatctggctgtactggagcggtgataccacatggggcaccgtactgctggtctggagctgcgttgtcggcaccatggataactttatccgtccgctgttgattcgtatgggcgccgacctgccgatgattctgatcctttccggcgttatcggcggcctggtggcgttcggcatgattgggctgtttatcggtccggtgctgctggcggtctcctggcgactgtacgatgcgtgggttaacgaagcgccgcctccgccgaaggaccccgacctggtgcttgaggagctgagcgaactcaatacccgagccacccaggataagtaagtgaaaaggcggggaaacccgccttttgcccctctgcccctatcgctgtcgggctcggcagccttaaagcttaagaaatcctaatctatctttcacgccattccacgacccgcggcctgctaaccgcatttgcttcgcagattctttaccttaatttaactattgagaggaatccgatcgacgcaaaaagcctcagtgcctagtattagctcacggttataaatcaacgcattgatttataagcatggaaatcccctgagtgaaacaacgaattgctgtgtgtagtctttgcccatctcccacgatgggcttttttttgtccgttttctgttccccaaaaacaaaaaatccccgccactgctgagctgacggggagtatccagttgcctgttttagcaagaacttacttattcagctccgccaggccgagccaggtttgcacgaccgtgtccgggttcagggaaaggctatcgatcccctcttccatcagccaggcggcaaaatcttcgtggtcagacggaccctgtccgcagataccgacgtacttgccctgcttcttcgccgcgcggatggccatcgacagcagcgctttcaccgcgtcgttacgctcatcgaacagctcggagaccacgccggagtcgcgatccagccccagcgccagctgcgtcatgtcgttagaaccaatagagaagccgtcgaagtattcgaggaactgttcagccagcagcgcattcgatgggatttcacacatcataatcagcttcaggccgttttcgccgcgcttgaggccctggcgttccagctcttcaaccaccgcttttgcctgcgcgacggtccggacaaacggcaccatgatttcgacgttggtcaggcccatgtcgttacgcacccgcttaaccgcttcacactccagcgcgaagcagtcgcggaagctttctgacacatagcggccggccccgcggaagcccagcatcgggttctcttcttccggctcataacgttcgccgccgaccaggttggcgtattcgttagacttaaagtcagaaagacgcacaatcacccgtttcgggaaaaatgccgcgccaagggtggagatcccttcggtcaggcgaccgacgtagaactctttcggcgagtcgtagcctttcatcagctcgcggatttcattctgcagccccggctcctgatcgtcgaactccagcagcgcgcgcgggtggacgccaatcatacggttgataatgaactccagacgcgccaggcccacgccttcgttcggcaggcaggcaaagtcgaaggcgcggtccgggttaccgacgttcatcatgatcttcagcggcagatccggcatatcgccaacggtggagctcttgacgctgaagtcgaggatttcggcatacacgtagccggtatcgccctcggcacaggagacggtcacattctggttttcctggatgcgatcggtggcgttaccgcagcccactaccgccgggatccccagctcacgcgcgataatcgccgcatgacaggtacgcccgccgcggttggtgacgatcgccgccgcctttttcatgatcggctcccagtccgggtcggtcatgtcggtcaccagcacgtcgccgggctcgatgcggttcatttcgctgatatcgtgaatgactttcaccggacccgcgccgatacgatggccgatcgcacgcccttccgaaataatctgtccttgcgcatggagggtatagcgctccatcacctggccgcgggaacggacggtctccggacgcgcctgcacgataaacagcttaccggtatggccgtctttcgcccattcgatatccatcggacggttgtagtgcttctcgatttgaaccgcttgctgcgccagctcctgcacttccgcgtcggttaacgagaagacgtcgcgctgcgcctgcggcacgtcttcgatacgcacctgcttgccgtgctcctgggtaggggcgtaaaccatgcggatctttttcgaccccatggtgcggcgtacgattgccggccggcccgcttccagcgtgggtttatggacgtagaactcatcggggttcaccgccccctgcaccaccatctcgccgagcccccaggcggaggtgataaacaccacctgatcaaaaccggattcggtatcgatggagaacatcacgccggacgaggccagatcggagcgcaccatcctctgcaccccggcggagagcgccaccccgcggtgatcgtacccttgatgcacgcggtaggaaatggcgcgatcgttaaacagcgaagcaaacacgtgcttcaccgcgacgagcacggcgtcaaagccctgcacgttaaggaatgtctcctgctgaccggcgaaggaggcgtccggcatatcttccgccgtcgcggaggagcgcacggcaaaggaggcctcagcgtcatcggcggacagctgggtataggcatcgcgaatcgcattttccagttcgctctggaacggcgtatcaatgatccactgacggatctgtgcgcccgctttcgctaatgcggaaacgtcgtcaatgtcggtttcatccagcagttcataaatgcgctggttaacaccgctttggtccaaaaactgattaaaggcatcagcggtggtggcaaacccgttcggtacggacacgcccatacccgacagatttgtaatcatttcaccaagggaggcatttttgcccccaaccctgtctacatcattcatgccgagttggttataccaaagcaccagcggtgacgagccattgttggacatcgagacaatccttttgtgatttaataccagtgataaataattcacgatcgactacgagatttatcctgacatatttatccagctgaaagaaacggtgaatcgttcaagcaaattattttttcgtttttaggattctttgccagatatagctaagctaatgattcttcagaaatctgatgaaatttgatacaaaagatacgcagttgcgaaaaatgaactcaccttttcattaaaaataaaaatagcgtttcattttttaaatatgagacaaagcctggagcgttatgcttaaatttaatatcagctttcagacaattaaactcattataccggatggtcaaaatggaaagtgctgtagatcgccacgtattttatatttccgacggtaccgctattacagcggaagttctgggtcatgcggtcatgtcgcaattcccggtcgccaccagcagcgtaaccctgccgtttgtcgaaaatattagccgcgcgcgcgccgtgaaggagcaaattgacgcgattttccagcagaccggcattcgaccgctggtgttctactccatcgtgctgccggaaattcgcgacatcatcctacaaagcgaaggcttttgtcaggatatcgtccaggcgctggtggcccccctgcagcaggagctgcgcctcgatccgacgccaatcgctcaccgcacccacggcctgacgcccggtaacctgaacaaatacgacgcgcgtatcgccgctatcgactacacccttgcccacgatgacggaatttctctgcgtaatctcgatcaggcccaggtgatcctcctcggcgtttcgcgctgcgggaaaacccccaccagcctgtatctggcgatgcagtacggtatccgcgccgccaactacccgtttatcgccgatgatatggataatctgattcttccggcttcgcttaagccgctacagcacaaactcttcggcttaacgatcaatccggagcgcctggcggccatccgcgaagagcggcgggaaaacagccgctatgcttccatgcgccagtgccggatggaagtgaccgaagtcgaggcgctttaccgcaaaaacaagataccttgcctgaacagcaccaactattccgtggaagagatcgccaccaaaatcatggatattatggggttaagccgcagaatgtactaacacactagtacattattaaaaatttgtttatgctatcacctgagccctatacaggatcatgccctgctcttgcaataagcggggattggtttatcgtgatgcgcatcacttcccggcattttcgccgcggaagaaacagattttgagaccccaatgaataaaacagacgaattgcgtaccgcgcgcattgaaagcctggtaacgcctgcggaactggctcagcggcatccagtgtctgccgacgttgccgcacacgtttccgcctcacgccgccgaatcgagaaaatcctcaacggtgaagatcgccgcctgctggtggtgatcggtccctgttccattcacgatattgatgcggcgatggagtatgcgcgccgcctgcagggtatgcgcgaacgttaccagccgcagttggaaatcgtgatgcgtacctattttgagaagccgcgcacggtggttggctggaaggggctgatctccgaccccgacctgaacggcagctatcgggtgaatcacggccttgagctggcgcgtagcctgctgctgcaggtcaatgaactgggcgtaccgaccgccaccgagtttctcgatatggtgaccgggcagtttattgccgacctgataagctggggcgctatcggcgcgcgtacgaccgagagccagatccaccgcgaaatggcctcggcactctcgtgcccggtaggctttaagaacggtaccgatggcaatacccgtatcgccgttgatgcgatccgcgcttcccgcgccagccatatgttcctgtcgccggataagcagggacagatgaccatctaccagaccagcggcaatccgtacggccatatcattatgcgcggcggtaaaaagccgaattaccacgccgccgatatcgccgccgccggggaagcgctggcggagttcgacctgccggaacagctggtggtggattttagccacggcaattgccagaaacagcaccgccgtcagctggacgtttgcgccgacatctgccagcagatccgcgccggctcgaccgccatcgccgggatcatggccgagagtttccttcaggaaggcacgcagaaggtcgtcgcgggccagccgctggcctggggacaatcgattaccgatccctgcctgagctgggacgatagcgaacggctgctggatgaattagccgccgccaccgccacccgcctgtagttcccctccccaccgtacgcgcggtggggagcgattttccgccatcgaccggcccgacacctgctaaatctggtattccgctaaataaagcttgcgtgaaaaacaacattattgataatgattatcattgttgccttgatttttatttttagtgctatgacgcgtatggataacactgccacagcagaaaaaacaacagacaatgccccgtatccggttccgacggacaaagagataagcagccggacattattaggcagcgagggacgggtggtgattgaacatcgcggtcagcgctacctgctgcgtcagacccattcgggtaagctgatcctgaccaaataattatccccgccgataaaggcagggataacgaacgttagctggaacagcttacttcaagacgccttccccagtccggtggacgctgaatatactcatccgtccgatcggcaaaggggtgagagagtgcgctatgcaggcgctccagttcgctcatatccccctgctccgcctgttcaatggcccgctgagccagccagttacgcagcacgatcgccgggttgacgctgcgcatccgcgcctgcctttgcgcatcgtcaacctgttcatcgcgcaggcgcgcgcggtaagcggtaaaccagctatcgaacgtctcgcggtcgataaactcatcgcgtagcggcgaggcggcgctctcctgctcgctggcgctgagcatccggaaggtccgcgtatagtcgctgccctcgcgttccatcagcgcaaacaggccgtccagcagctcgttatcccctttttgctgggtaaacaatccgagcttgtcgcgcatgcggcggccatacgccgtcagcagggcatgctggtaactatccagcgcgtcgttcagcgcctcagcgctgataaacggcgagagcgtctgcgccagccgttgcaggttccatagccctaccgccggctgattatcaaagctgtagcgcccctgataatcggagtggttacagataaagccaggctggaaatcatcaaggaaaccgtacggaccgtagtccatcgtcaggccgagaatcgacatattgtcggtattcatcaccccgtgggcaaagcccaccgtttgccagcaggcaatcatctccgcggttcgggtgacaacgtcactgaaccacagaaggtacttatccgcttcattttgcagatgcggccagtggtgacgaatcacgtaatccgccagctgctgcactttcagaggctcgcgacggtagtaaaaatgctcaaaatggccgaaacgaacgtggctttccgccagccgcatcagcattgccccgcgctcgacggtttcgcggtataccggcgtatcgctggccactatcgccagcgcgcgggtggtgggaatgcccaacgcatgcatcgcttccgaggccagcgcctcgcggatcgtcgagcgcagcaccgcccgcccgtcgcccattcgcgaatagggagtgagcccggcgcctttaaggtgccagtcaaagcgacgaccatcagcgagctgctgttcgccgagcagaataccgcgcccgtcgccgagctgcccggcccaggcgccgaactggtggccgctgtaaacctgcgccagcggcgacattcccggcagcagcgtttcgccgccccatacgccagcgcccttctgcgggctgaataacgacgcgtcaacgcccagcgttcgcgccagcggagcgttgtgccagacaagccgcgcattctccagcggcgtaggggttaaagcggtgtaaaaatccggcagttcatcacgccagtgggtagtaaaagacagggtcatggttcctcctgccttcagtgtagtgctttcaacaaattattaacacggaggaatggatgggttattgcgataaaagacaagacgggcgttgtggcgctgcccggtaaggcgttaccgccgccgggcaagaaaacgccacgctacgctttgacgtatcgaggctagatccttcgcgcctgccagaattttttatgccagtagacattatccagcgacgatcgcgtcacgccctggctggtggaggcgtggataaactggttatccgtgtcgtaaataccgacgtgcagaccgctctctccggaaccggtcttgaagaagaccagatcgccgggcagcagttcgctcttatcgattttcgtgccgatctccgcctgctcacgcgtttcgcgcggcagctgcagcgcgaacttatcgcggaaggtcatcagcacaaacccggagcaatcaacgccgcgcggcgacatgccgccgtagcgatacggcgctccccgccagctccttagctgctcattcaggttagcaacaacggtaatcgaatcagcaagccgtggattgggcggcggcgcccggtggctgctacaacccgccagaaataacgcaacacacaaaacgagccaaaaacgcatctcagacgaatcctctgttccctatcctgatagcaggataatttaccttgtttattaattcgctggcaagctgactgcgtgctactgtgacgcaacgagcataagatgacccgccacctcgacccgctggaagtccatggcataggcggcggttaaattctcttcgcttaatacctcggcggtgctgccgcaggcgatcgtctccccccggcagataagccaggagcgatgggcgtgtcggagggtatgattcaggtcgtggctgctcatcacgacggcaatccccgaggcgcagagttcgcttaacaatcggtccagtgcggcctgctgcgccacgtccaggctgttcatcggttcatccagcaatagcaactgtccggacgcgttagcctgacgatgaatctgcagtattaccgccgccaggcgcacgcgctgccactccccgccggagatgtgattcacctggcgccccagcttgtcgcctaagcccagcttctccgcgatggtcgtcagtagcccgttgtgcgcgtcgtcctggagatgcagcgacagataatgccagaccggcatggcgaaaggcggcatctggtgctggcttaaataggcccgatgacgcgccagctcctgcgccagccagtcattcagcgggcgtccattcagttttacctggcccgggccggtagagagccccgccatacgcgccagcaacgtgcttttccccgccccgtttggccccaccagatgaacgatctctcccggccggatatcggctgaaaacggcgccagccgccccgcctcttctacatcctgtagctgcatcaaaaacggcattatttggctaaagctcctttaatagcggccaccagctgcggatcatccggcgtcatatccggtgagaaacggccgatgacctgaccatcgcggccgatgaggaatttttcaaaattccacagaatatcatccacgtacagcggcgctctgcctttgctggccatgcgctcataaaaaccgctgccttccggggcgatagcctgcggggcggcctcaaccagcttctggtacagaggcgcgcgatgttcgccgttgacgtcaattttgctgaacatcgggaatgtcacgccgtaagtcgtgctacagaacgttttaatctcttcttcgctacccggctcctgacccagaaactggttgcacggaaagcccagtacgctaaaaccttcgctttctaaatctttttgcagcgcctccagctgctcatactgcggcgtcaggccgcactttgacgcgacgttgacaatcaacaggacgttgcctgcccacggggtgagcgttgttttctcaccatcgatggtggtgacttcagtattgagaatatcgtgttgcatagccttccctctgtgaatataccggttactgcttcaggtgatccctatctactgtagcggattcagactgggtcattctactttgaatcccccgggagtgtctcttgatgtaacaggcagcacaacatgaattcatctcaacaccgggagcgcgcaattcagtgtacagtggtggattgatgtaatagcatttcgttaattgttaatttaagagagttttattgatgaagaagatgtttagcgcggtgttaatcgcggcctccgttacgctgctttcggcctgctcgccggatgaagataataagattaaagtcgccattaataccgggccggatgaggctatctggaaagtcgtagaacaggtggccaaagagaaatacaacctcgacgtcgaggtaatctcatttaatgattacgttctgccgaacgaagccctgaacaataaagacgtcgatgctaacgccttccagacgctgccttaccttgaggcacaatcaaaagagcgcggctataagtttgccattgtcggtaaaaccttcgtcttcccgatcgccgcctactcgaagaaaatcaaaaatatcagcgaactgcctgacggcgcgacgatttccatctctaacgaaaccacaaccctgggccgcagcctgctgctgctgcaggcgcaaggtttaatcaagctgaaagagggtacaggctacctgccgacgacgctggacattatcgacaatcctaagcagttgaaaatcgtggaagtcgacacgccgcagctgacccgtacgcttgatgacccgaacgtcgccctgtcgatcatcaacaccaacttctccgctcaggccggtctctcggctgcccgcgatgggctatttatggaaggcccggactcgccgtacgtcaacgccattgttgcgcgcgaagataataaagacagcaaaaaagtccaggagctgaaagaggccttccagactcagcaggttgccgacaaggcagcggaagtctacaaaggcgatgcgattaagggctggtaatactatcaaccacttacggccgcccctcactgcgggcggcctgatttcagcaataaccagataaacaccggcgctcccagggtggcggtgaccacgccaatcggcaattccgccgccgaaagcgccagacgcgcgataatatccgcgcccagcagcgcgctggcccccgctaacaaacaggccggaagcagcgcgcggtgatcgcttaagccacataagcgcagaatatgcgggataaccagaccaataaagccgatcgcgccggccagcgccacgctgacgcccaccagccagccggtcgccaccaccagcactttacgccatagccacagcggtagccccagctggcgtgcggaaacctcccccagcgctaacagattaagaggctgcgattgcaggcacacccaggccagcacaggcagcagggccagcatcagccacagctgctgccagtccacgccgccaaagccgcccatcatccagtacatcagctggcggagatcgaaagaggttgagaagtagaccgcccaggtcatcagcgcgctgcatatgataccgagcgccacgcccgccagcagcaggcggctggtcgagagatgccgcctggcaaaacgcagtaaaataaaggtaatgaccagcgcgccagcgatggcgcacagccccagcgcccagcccggaagcagcccttttcccagcaacacggcggctatcaggccaaccccagcgccgtttgatacccccagcagcccgggctccgccagcgggttttcaaacagcgcctgcataatcgcgccggacagcgccagcgccgcgcccaccagcaggacggccagggtgcgcggcaaacgaatctgccagataaacagctcgcctttggcgctaaaccattcaccggggccaatccactggtcgcccgcgcacaggctgatggtcgatgtgaccagcagcagcaacgttaataccgcaagccagcgccggttgcggcgccgttgagtttgagcaaaggtcagcatagatttctgagttgagaaaaaggatgtgattgattttacggtattcggccaggaaaagaaaaaaggccgcatagcggcctttttgattagtcagtccagatcatttctctctgggtgaagcgttttcgacacggctttttaacttctgtccgggtctgaaggtcaccacacgccgggctgtaataggaatatcctctcccgttttcgggttacggcccgggcgttggtttttatctcgcaaatcgaagttgccgaacccggagagttttacctgctctccgttttccagagcgcgacggacttcttcgaaaaacaactctaccagctctttggcatcccgcttgctaagcccaagcttatcaaacagatattctgacatttcagcttttgtaagcgccataggttcaatccctcaatgatgcctggaatcgctctttcaatgcctctacacatttggcgacggtagcggcaatctcctcttcttcgagtgtacggctggtatcctggaggataaggctgatagcgaggcttttgaaaccttccgctacgcccttgccgcggtacacgtcaaataagtttacgccaactacctgatttacgccaactttcttacactcggctaaaacatcggctgcgggaacgttttctgccacaacgacagcgatgtcgcgacggttcgccgggaagcgagaaacttcacgcgcctgaggcaccacgcggtctgcaagcttgttccactccagctcgaacaccaacgtgcggccgttcagatccagtttacgttccagctcgggatgaacaaccccaataaaaccaatacgttcacctttcagataaatcgccgccgactggcccggatgaagcgcattattggcttcgatgcggaattcgatgtcggacagtttacccgtgaggtcgagaacggactccagatcgccttttaaatcatagaaatcgacggtttcttttgccaggttccagtgttcttcatagcggttaccgcagattacgccagccagcatcacgtcctggcgaatacccagcggggcctgcgtatcgggaacaaatcgtaggccgctctcaaagatgcggacgcgactctgctggcgattctggttgtagaccaccgtcccgagcagaccggtccacaatgacagacgcatcgccgacatttcgctggagatcgggctcggcagaatcagcgcttcctcgccggcgtggatccactgctgtactttcggatcaacaaagctgtaggtaatcacttcctgatagcctttgtcgttgagcagcgttttcacgcgcttaagcgacagatccgcttcgcggtgagtgcccataatcaggcccgcttgtaccggttcatcaggaatattgttatagccatagacgcgggcaacctcttcgaccaggtcttcttcgatctccatgtcgaaacgccagctcggcgccacggcatgccactcatcctggccttcggtaacttcacagcccagacgacgcagaatgtcgctaacctgcgcatcttcaatgtgatggccaatcaaacgatccagtttgctgcggcgaaggcggatggtcgcaggcttcggcagagtcgcttcattggtcacgtcaataatcgggcccgcttcaccgccgcaaatatccatcagcaggcgggttgcgcgctccattgcctgatactgcagcgcggagtccacgccgcgctcgtagcggtgggaagcatcggtatgcagaccatggcgacgggcgcgaccggtaatggacagcgggctgaagaacgcgcattccagcagaacgttttgcgtttcatcgtttacgccggagtgctcgccgccgaaaattccgcccatagccagggctttctggtggtcagcaataaccagagtatcggtatccagcttagcctcggagccgtcgagcaggaccagggtttcgccttcatgcgccatacgcacgataattccgccttcaatgcggtctttatcgaaggcgtgcatcggctggccgagctcgagcagaacgtagttggtcacgtcaaccacggcatcgatggagcgaatgccgcagcggcgcagcttctctttcatccataacggcgtcggcgctttgacattaatgccttttaccacacggcccaggtagcgcgggcatgcttccggcgcatcgacctgaattggcagaacgtcgtcgatggtcgcggcaaccggggccatttccgggacattcaatggcgccttgttgagcacggcgacatcgcgggcaatgccgataatacccaggcagtcggcacggttcggcgtgacgctgatttcgatagtgttatcgtcgagcttcaggtattcgcggatatcggtacccagcggcgcgtcggcgggcagttcaataataccgctgtgatcgtcggagatccccagctcggagaaggagcacagcatgccttccgacggctcgccgcgcagctttgccgctttaattttaaaatcgcccggcagtacggcaccgatggttgcaacggcaaccttcaggccctgacggcagtttggcgcgccgcagacgatgtccagcaggcgttcgccgccgacgttaatttttgtgacgcgcagtttgtcagcattagggtgttgagcgcactcaaccacttccccaacgacaacgccgttgaagctgcccgcaaccggctcaacgccgtcaacctcaaggccggccatcgttatctggtccgacagcgcttcgctatcgatagctgggttaacccactcgcgtaaccacagttcactgaatttcattgttctgtcctgcccttatttaaactgtttgaggaaacgcagatcgttttcgaagaacgcgcgtaagtcggtcacgccgtagcgcagcatggtcagacgctccatacccatgccgaaggcaaagccggaatagatttccggatcgatacccacgttgcgcagtacgtttggatgcaccatcccgcagccgagcacttccagccatttcccgtttttccccataacgtcgacttcggccgatggctcggtgaacgggaaataggacggacgaaaacgaatctgcagatcttcttcaaagaagttacgcaggaaatcgtgcagcgttcccttcaggttggtaaagctgatgttggtatcaacgatcaggccttccatctgatggaacattggggtatgggtctgatcgtagtcgttacgatagacgcggcctggcgcaataatgcggatcggcggctgctggttagccatggtgcggatctgcacgcctgaggtttgcgtacgcagcaggcgcgtggcatcaaaccagaaagtgtcgtggtcagcgcgtgccggatggtggccaggaatattcagcgcatcgaagttgtggtagtcatcttcgatttccgggccagtcgcgacggtaaagccgagctcaccgaagaaactttcaatacgatcgatggtacgggtcaccggatgcaggccaccgttctcaatacgacgccccggcagagagacatcgatggtctccgaggccaggcgcgcgttaagagcggcgctttcaagatctgacttacgcgcgttaagcgcctgctggacctgctctttcgcttcgttgataaccgcgccggctgccgggcgctcttcagcaggcagctcacgcagggtcgtcatctgaagggtcaggagcccttttttacccaggtattccacgcggacgttgtccagcgcagcaacatctgatgcctcgttaatggctgccttcgcactggcaaccagctctgcgagatgtgacatggttttcctcattatgtcggtgcagacaccggttatggttattattttgctttcactatttcgagccgcagacggcgggtcattcgccatttgaccgaatgacccggtcaatccacacgtctggagcttgaaatagaacaagccagttcagatacaaaaaaagcctccacagtgggaggctttttggcgctgttttccgtttcttctttcacgcgctagcctcctgagttcaggtgctaaagtaaaaaaagaagcggaaaatagcagcattcatgcttgcattaccttgtctgctaaaaaacgtaagatcgatattgaaaagcttacgcggataaaagtcaatgtattgatagtcttgaaacgaaaagagggagacaagctccctctttcaactggcttatgccagagctgctttcgctttttcgaccagcgcggtgaacgctaatttgtcgaatacggcgatgtcagccaggatcttacggtcgatttcaacagaggcttttttcaggccgttgatgaatttgctgtaagaaataccgttctgacgtgctgctgcgttgatacgcgcaatccacagttgacggaactgacgctttttctgacgacggtcacgataagcgtactgaccagctttgataacagcctggaaggcaacgcggtatacgcgagaacgcgcaccgtagtagcctttagcttgtttcaaaattttcttgtgacgtgcacgggcaactacaccacgttttacgcgagccatatgtgctctcctgtatctattctaattaaaaagttaaaagggttaacgacttatgcgtacggcaggcacgcgatgaccaggcccagatcgcctttagaaaccatggctttcggacgcaggtgacgtttacgcttggtagcttttttggtcagaatgtgacgcaggttagcgtgcttgtgcttaaaaccacctttaccggtttttttgaagcgcttagcagcaccgcgtacggtcttaatttttggcattttaataacttccacttcgcattgttaataaacgaaacataggcgaacaacggctgcggaacccgcaggctccacagacattgctacttgaaggccttactgtttcttcttaggagcgagcaccatgatcatctggcggccttcgatcttcgttgggaaggattcgactactgccagttcactcagatcgtcacggacgcgggtaagcacttccataccgatctgttggtgggccatctcacggccgcgaaaacgcagcgtgatcttggccttatcgccatcttccagaaagcgaatcaggctgcggagttttacctgataatcgccatcgtcggtgccaggacggaacttaatttccttaacctggataactttttgctttttcttctgttccttagaagacttgctcttttcataaaggaacttgccgtagtccatgatacgacaaactggcggttcggcgttagggctgatttcaactaaatctactccagcttcttcagctttttcgatcgcttctctcagactcacaatacccaaagcttcgccttccagaccagttaagcgaacttccagggcgcgaatctcgccattaatacgattcggacgtgccgtttgaactcgttttccgcctttaataccttattcctccagttgttttagactgcggctgcgaatctcttgttgcagcttctcgataacttcatttacgtccaggctgcccaagtctttgccacgacgggtacgcacggcaactttgccggcttctacctctttgtcgccacagaccaacatgtaagggacacgacgtaaagtgtgctcgcggattttaaagcctatcttctcatttctcaagtctgcttttacgcgaatgcccgcattttgtagtttacgcgtcaattcgttaacgtattcagcctgagaatcggtaatattcatgaccacaacctgcaccggcgccagccagctggggaagaagcccgcaaactcttcggtcaggatgccaataaagcgctccagcgaaccaagaatcgcgcggtgaatcattaccggtacctgtcgttcgttattttcacccacataagaggcgcttaaacgctgcggcagggagaagtccagctgtacagtaccgcactgccatgcacgatcgaggcagtcatacagggtaaattcaattttcggaccgtagaacgcgccttcacccagctgatactcaaacgggatgttgttctcttccagcgccacggccagatccgcttcagcacgatcccatgtctcatcgctaccgatgcgtttttccgggcgagtcgacagcttgacgacgattttctcgaagccaaaggtgctgtacatatcgtagaccatgcgaatacaggcgttcacttcatcgcgaacctgatcttcagtacagaagatatgggcgtcatcctgagtaaagccacgtacgcgcatcaggccatgcagcgcgcctgacggctcattacgatggcagctaccgaattcagccatacgcagcggcagatcgcgataggatttcagcccctggttgaagatctgcacgtggcccgggcagttcatcggcttgatgcagtattcacggttctcggaagaagtggtgaacatcgcatctttatagttgtcccagtggccggttttttcccacagcacgcggtccatcataaacgggcctttaacttcctgatactggtactctttcagcttagaacgcacaaaagtttccagttcgcggaagatagtccagccgtcgttatgccagaacaccatgcccggcgcctcttcctgcatatgatacaggtcgagctgcttaccgattttacggtgatcgcgcttagcggcttcttccagacgctgcagataggcatttaaggcttttttatctgcccatgcggttccgtagatgcgctgcagcattttattgttgctatcgccgcgccagtaggcgccagcggtcttcatcagtttgaaatgatgacagaaacgcatattcggcacgtgcggcccacggcacatgtcgacatactcttcatgatgatacaaaccgggtttgtcatcatgcgcaatgttttcatcaagaatggagactttatagctctcgccgcgcttcacgaaggtttcacgcgcttcgtgccagctgacttttttcttaatgacgtcgtagtttttctcggcgagctcgtgcatacgtttttcgagcgcgtcgatatcttcctgggtcagggtatggtccagatcgacatcatagtagaaaccgttgtcgacaaccgggccgatcgccatcttggtatttggccacagctgtttaatcgcgtgccccaaaaggtgcgcacaggagtgacgaataatctcaagtccatcttcatctttcgcggtgatgatagagagcgtcgcgtcgttttcaattaagtcgcaggcgtcaaccagttcgccgttgacgcggccggcgatggtggctttcgccagaccggggccaatatccagagcgacgtccatcgggctcacagcgtgatcaaaatggcgttggctgccatcaggaagcgtaattacaggcatttcatgtccttatttgcagtggtgccccgcacgaaagagcacatacaaaacaatataatcataattatcaacacgttcaggcccagttcccgcttcactctgcgaaaatatgtgcacgctcgttcaccgacgcgtacccacctgcagccgcctgttgataacaccgacggttagtttacacatcattagtgcgtgataaaagtcacatgagactaaatggttattgctgatggaaaaaaaaggtcgcggcgcaacaaacccagcgtaattgctgcggaaccgtgcggcaaaagagcgcggcaggacgatatgacgcataaagaatatttatgctttcacatcaattatgcatgtttaacacaaagtgcggaaagcaaaaccggtacggcattacccggtttgctgcttcacgaaataattaaaggatgatgttcaagaacaatgaaatatcaggaccattcgccggcgacaagtttatgaacatcaaaagcatcattcattgactgcccggtagactgtgagcccggcgctatgttggagcctgcttcgacatcggtagctttggcgataccaacttgggtatgctcgttattacccggctgcggtgcgggagcggcggcaaatgcgccaaaagacagcgtgcacagcatcacggccgcgagtgcgattttgctatttctcatgatagtcattctcttatttgtttcagataaatagaacggcgtcgttatcgccgcctgtgtgcaacagtatagatccagatcacatttttgtccgacccaatatttatcttttcgtgtcaaattaactgcatatttgtcagcaaaatagcaattgtggggaaattatgaagacgatttctttttataaaaaacaaaacgagagaccaaaaataataatgtcacttattgccaaatttaaaacaatcaggccagaatatctggcctgaaatattacattttataaccgagcgatagcgtggtacggcgatcggtgtgttccggcgccgatgacggcggctcagagttccacgtcaggttataggcgaccttgagggcaaagtgagcattaatggcaacgttcagcgcgctttcggagttcagcgtcgtatcttcagcgccgaataccgaaacaccttgcgtaaatttggcgttatcggtcatctgccaggcgtaagtgccggaagcatagcccaacggctgagtatcagtatcaccgtcggtatactcgtcgtagcgtacgccaggaccaaattcaaaacgcagactgtgcaccggtccgttcataatctgtcgaccataacctgcggtaaacacatcccgctgctgataaccattgtaacgatccgtcagccagctggcctggccaaatatatagttctggtcagtcaggttgtaacgactacgtccccccaccgcgtacctttccgaagagcgctgatcgtttgacgacgtattgctggcattcccccacagcgaccatgcggtggtattgccataccaggtcaacgtggagtcggcggtcattgaggaacttttcgtattgccggactgcgccagataaccggcgttaacagtaccttcgaaaggttttttagcagaagatgggtcatccatgacagtaaaaacggaatcatcggccattgcgcacgcagacgcaaaaagccctcccgcgagcaacgccgctgcgggtactgtcttcaaaagcttcatttaattttaagtccgtacaacctataaggagacctggagggtcccgggagctttcgcgaggatcgcggatagccggtcctaagaaagggagtaaattataaaaaagcacgattaacttagcaatcaattactctttcattttttgtataagacgcttctcaaaacaatttttatttcataaagataaaaagaggttgcgttgtataagtggcccgtcgcttccccttccctcctttaagtgccatgcttaaaaccagagcagctaaattcgtattatggaggaaactggatgaccaaaatctatacgctcacgttagccccctcgctcgatagcgcaacccagaccccgcaaatttacccggaaggcaaactgcgctgtagcgctcccgtgtttgaacccggcggcggcggaattaacgttgcgcgagccatcacttttcttggcggcagcgccacagccatctttcccgtcggcggggcgacaggcgaacacctgacggcgctgctgacggatgaacatgttcccgtcgatacggtagagacccatgactggacgcggcagaatcttcacgtgcatgtgaacgccagcggcgagcaatatcgtttcgtgatgccgggcgcagcgttaactaaggaggagctccggctccttgaggaaaaggtcctcgccatcgccccgggttccctgctggtgattagcggaagtctcccgcccggcatcagcgtcgataacctgacgcagctggtcaaaaacgctcagcagcatggattgcgctgtattgttgatagttccggtgacgcgctcgccgcagcgcttgatgtcggcaatatcgagctggttaagccgaaccagaaagagcttagcgcgctggtacagcgcgatctgagccagccggatgatgtgcgtcttgcggcgcaggagctcattcggtcgggcaaagtccagcgcgtcgtcgtctccctcggtgcccagggtgcgctcggcgttgatgcccagggtagcgttcaggtggtaccgccgccgatgaaaagccagagcaccgtcggcgccggtgacagtatggtcggcgcaatgaccttaaggctggcggaaaacgcctcgcttgaagatatggttcgctttggcgttgcggcgggtagtgcggcaaccatcaatcagggcacccgcctttgctcgctggataatacgcaaaaaatctacaactatctgcgcggttgataacgccttcgctccctctgggaagacagagggagtcgccaaatcagcatgatggtctatgctaaaaatgccatggataacaacggggtgaaaaatgagtagcgaaattattgcctgggtcgtcacggttcgttttcacgaagagacgttaacggaaattaacgaactcagtaatcacctcacccgcgccggatttaccctcgtcttaaacgatgatgaagggaacgtccacgagctcggcaccaacaccttcggcctgctttctatgcagaatgccgaggaagtcaacgccttaagcgcaggtttagccgaaaccgcgctgggaagacccgtcgacgtcaccgtggtcacattcagcgagtggttaaaagctcaataagtgcgattgacgcaacggaaaacgtccagttgtgcgtcagttcgagttttacgccgggtttatgcgctaaccttatgaaatgttggaaaacatggggagagacggcatgtggcaagctatcagcaatttgttacgcgatttgcataccgaagcagctgaaatcgaactgcgaaacgaactacccggtggagagatacacgcggcctggcatttacgctatggcgggcgagattacttcgtaaaatgcgacgaacgcgagcttttacccatcttcacggccgaggcagaccagcttgaactactgtcgcgcagtaaaacggtgaacgtaccgcaggtttttgccgtgggcagcgatcgagattacagctttctggtgatggaatacctccctcctcgcccgctggatgcgcacaacgctttcctgttaggccagcaaattgcccatttacatcagtggagcgaccaacctcagtttggtctggattttgacaacgacctctccaccaccccccagccgaacgcctggcagcgtcgctggtccacgttctttgccgaacagcgcatcggctggcagctggaactcgccgccgagaaaggcctgcattttggtgatatcgatcatcttgttgatattgttcagcaacggctgagcagtcatcagccgcagccgtcgctgcttcacggtgacttatggtccggtaactgcgcgctcgggccaaacgggccctatattttcgaccctgcctgctactggggcgatcgcgaatgcgatttggcgatgctcccgctgcatccggaacagccgccgcaaatctatgacggctatcagtccgtatcgccgctgccgtccggctttctcgagcggcagcccatctaccagctctatacgctgctgaatcgggcaattctgtttggcggacagcatctggtgacggcgcagaaagcgcttgatgaggtgttcatggataaggccccgtaaggggccttgtttttgagggttagctaatttgtacgcctttcagacggaactgaatggtcatggtaatgccggttcccggtttgcccggttcatagcgccatttacgtaaagcgtttttcacttcacgctcaaacatattggcaggctgggcggagaggatctgtacgttgtccacgcgcccgtccggcgtgacgtcaaacttaacccgcacggttccttcaaggcgcagcgcctgggcacgattcggatagatcggctctccgcggcttagcgcccgcggcccggaaggcaccgtcacggtgggtttagcggtcgcggctgaggtgctcggcgcggtgcgcgccggcgccgtatttgtattttcaaacggcgaggccgggcgcgtttccgccggttttacatcacgcttcggttgttcgacctttttttccggcttcggtttaggctttggcttcggttttggctttggtttatggataacaaccggcgcctcttttggcggttcaggcatcacttccggttccggttctggctccggttcaacaacgggctcaacgaccggctgagccgcctgaggcggttccagatctgccggggtcaccatagtgatttcaatgggctgtgagggtgccggccgttcaataacctgatgtaccgaagtatagagcaaccccgcgataacactgccgtggataaccacagacagtagcgtaggccacggaaagcggcgaggtaaatcaaaggtcattgcgctcatagtcgtttctgttgaaaaatgatgccccgattttaaatgcaaatagcaatcatattcaactagggttgttggcttgtatcaaaatttgccctgttttctgacaaaaagctcccgggacgtggcattctggggatcgtgatcatctttgcattgcagtcaacgacggtttcacttaacgtgattcgccaatttattgataaggagccatgccgtgctttacgttatctacgctgaagatatcgccgactctctggaaaaacggacatcggtacgtcccgcccatctggcgcgtttgcaattattacatgatgaaggtcgtttactgaccgccggcccaatgcctgccgtagacagtaatgaacccggcgcggcgggcttcaccggctcaacggtcattgcggaatttgaatcgctggaagcggcgcaatcatgggccaatgacgatccctatatcgccgcaggggtttatcagaaagtctcggtgaaaccgtataaaaaagtgttttagcctataaaatgcttaagcaataagaatgcggttaaaatttaatctatggcgatcgttcattagaggacgtttctaagtacgcgagtacggaatggtcgccatccttatgtctctccacttccccggttctgcattccgttctctttaggacgcgccctgatgatagccgtttgccgacagtgcatcagcaccgccgactttctatggttaattacctgttggacttcagcgttcccttaagaccatgcggttctgagcgaagatactgcggcggaacgctcacctgagcgcccagggctgccgcggcatgccatggccagtgcggattgtagagcacggcgcgggcaatggcgatgaggtcgacgtcgccattttgtagcgcctcttccgcctgctgcgcttccgtcaccagacccacaccgatcaccgggatattcaccttctcgcggatttcacgcgcgaacggcagctgatagccgggccccacctgaatcgcctgatgaggcgacagcccgccgctggaaacatgaatatagtcgcagccaagcgcctcaagctgctggctgaagataatcgattgtgcgttatcccagccgccatccacccagtctgttgctgaaagtcggacgcccaccgcgatgtcctgactgacggcctcacggatggcccggaatatctcgagcggaaaacgcaaacggttctccagcgagccgccgtattcgtcggtacgctggttactgagcggtgaaaggaactggtgcaacaggtaaccatgcgcggcatgcagttcaatcaattcaatacccatccgctcagcgcgtctggcgctgtctacgaatgactgcttgatgcgtttcatgtggtcctgagtaagttcaaccggcggtcgttcaccttcaccataggccagcgctgatggcgcaaccgtgtcccatccgccagaatcatgcgccagctggtgtccccccagccagggggctgcggaagaggcttttcgtccggcatggcccagctggataccgatggggattgaagcgtactggcggatatcgttcagcacggtgcgtaatgcggcttccgtttcgtcattccataagcccaaatcagccggggtaatgcgtccggcgggctctacagcgctggcttcgataatcagtaagcccgcgccggaaaaggccagctgtccgagatggatacgatgccatgccgtcgccttgccattgtcggcggagtactggcacattggcgcaatgacaatacggttctcaagttccagcttaccgattcgcaccggactaaaaagttgactcatagatacctctcaataatagaagccttacggacattataagtagcatgtgctgatgcatggcacttcccgttttttgcgtttatacgcgttgggccagtcttatgaggtatggcgcgatgcgacttcctgcccgccgctgctgatgcaaacaataacgcaggagcccgcgagaaaccgggtttcgccggcagaaggaagagagatgacagtataaggatgtatgctaagaacgaaacgctgataaaacagaggcaccgcgagcggtgccttttgtttcgactctcaacattcagagaaggtgaacagcagagagtgacgttgccgtttaaccagctcctttctgatggagaggatgcgcatattacgacgcgactggccttccagccagcgtgctttacggcgactcacctgccgaagcatgcgccagcgccctacttccgttctactacgcttcattgcaactactctacaagtaaaaacagcctgcattatagaccgatgaatctggctaaccaacgctttcgctgcgtttttatttgccagatagatgatgatgcgtaaactcatgtcatcaagtcattcaaaaggatttttcatctatgacaaccttttacacggtggtgaactggctggttatactcggttactggctacttatcgccggtgtaacattacggatattaatgaaaaggcgcgcggtcccgtcagcgatggcatggctgcttgtcatttatattcttcccctggtgggcattatcgcctatctctcgtttggcgaactgcatctgggtaaacgccgcgccgaacgcgcgcgggccatgtggccctcaacggccaagtggttaaaggacctcaaagcctgcaagcatatctttgccgaggagaatagtccggtcgcggaatccttgttcaagctctgcgaacgtcggcagggcattggcggcgtcaaaggcaatcagctccagctgctcaccgaatccgacgacgtcatgcaggcgctcatccgcgatatccagctcgctcgtcacaatattgagatggtgttctatatctggcagcccggcggcatggccgatcaggtcgccgagtcattgatggcggcggcaaggcgcggcgtacactgccggctgatgctcgactccgcggggagcgtggcgtttttccgtagtccctgggccgccatgatgcgtaatgccggcattgaagtcgtcgaagctctgaaggtcaacctgatgcgcgtctttctgcgccgtatggacctgcgtcagcatcgtaaaatggtcatgatcgataactatattgcctataccggcagtatgaatctggtcgacccgcgtttctttaagcaggactccggcgttggccagtggatcgatctgatggcgcgaatggaaggtccggtagcgacagcgatgggcattgtctactcctgcgactgggagattgaaaccggcaaacgtattttaccgccgccgccggacgcgaacattatgccgttcgaagaggccagcgggcacacaattcacactatcgcctcgggtccgggttttccggaagatttgatccatcaggctctgttgactgccgcctacgcggccaaagagcatttgatcatgacgaccccctactttgtgcccagcgacgaccttttgcatgccatctgtaccgccgcccagcgcggcgtcgatgtcagcatcatcctgccgcgcaagaacgattcgctgctggtgggctgggccagtcgcgccttctttaccgaactgctggctgccggggtgaagatttaccagtttgaaggcggtctgctgcatactaagagcgtgctggttgacggcgaacttagccttgtgggtaccgttaacctcgatatgcgcagcctgtggctcaacttcgagattacgctggtgattgacgatgccggatttggcagcgatctggccgcggtgcaggacgattacatctcccgctcgcgcctgctggacgccaggctgtggttaaaacgtccgctgtggcagcggatcgccgagcgactgttttacttcttcagtccgttgctgtaaaacgtgccaatcagatgtttaatgggtagcaatcatggatatggatttaaacaatcgcctgaccgaagacgaaacgcttgaacaggcttacgacattttcctcgaactggccgtcgacaacctcgatccggcggatgtcattctgttcaacctgcagtttgaagaacgcggcggcgccgagctcttcgatccggcgcctgactgggaagagcacgtcgattttgacctcaaccctgacttcttcgctgaagtggtcattggtctggccgatgaagatggcggcgaaattaacgatatttttgcgcgcgtgctgctgtgccgtgaaaaagaccacaagctctgtcatattctgtggcgcgaataagctctttcttaagtaaatagcttatatataaaagaagaagcctgcctgagttaaccagggcaggcttttttggttattcaggcagttcgctgccgcagacgttgcagtagcgagcgtctttttcatgaacgttatgctggcaatgcggacactggcgctgagtccggcgactctgaaatgcggtggtcatatggctggtaattaagccggtggggatcgcaataatcgagtagccaattaagataagaatggaggccaaaattcgccccagcggcgtatgcggcgtaatatcgccataccctaccgtggttatcgtcactatcgcccagtaaaccgacgcgttcagcgtagtaaaaccgtatcgcggcccctcaaccagatacatcagggagccaaagatcaccatgacgatggcaacaaaagaatagaacaggatcagctggtggcgagcgctgacgatagcggcccagaaaatattcaacgacggcataaagcgcagcagcttaaggatacgcaacgcgcgaatagcgcgcatggctcgccaggcaaacacgtactcaatactgatctcgggccacagccacataacgtaaagcggtaaaatggtggccaggtcaataatgccccagaagctgaaaatatactttagcggattcggccagctgataatgcgcagaaaatactcaaaggtaaaaaccgccgtcacgacaagttcgagccagacgaaaatatgccattcgtctaaggtcagatgatattgcgttccgagcccggactcgataaatatcaccagcacgctaagcagggcaaatacgccgcaaagtccctcgaaatgccgaccggatcgtcggttttgatcgaagagtaaatgatacagccgcagacgagcggcatgaatatgaaaagccacgttaacctcgctaaaaaaagggctgactaacgtcagcccctgagattataacgggtccaccttcaggcaggaaaccgcatggcggaaactgccctccagcaccggtcgcgtcttagcgcactccggcccggcaatcgggcatctggtgcggaatacgcatcccgacggcgggttaatcggcgatggcaattccccctccagaagctggatcgttttattcttttccttatcagggtccggaaccggcaccgccgacatcagcgctttggtatagggatgcagcggattatgatacacctcatcataggtgccgagctccacggcatggccaagatacattaccagcacgcgatcggagatatgcttcacgaccgccagatcgtgggcgataaaaatcagcgacagtcccatttcccgctgcagctgctgcagcagattcactacctgcgcctgaatcgacacgtccagcgctgacaccggctcatcgcaaataatgagcttcggttcaagaattagcgcacgggcaataccgatacgctggcactgaccgccggagaattcatgcggatagcggttaatcaggttcggcagcagccccactttcatcatcatcgccttaacgcgatcgcgaacttcctgacgcggcattttgggatgataggtgcgcagcggctcggcgatgatttccccgatagtcatgcgcgggtttagcgacgccagcggatcctgaaagatcatctgaatatcgctgcgcacgtcgcgccactcgtcggccttcatccccagcaaatctctacctaaccaggcgactttaccgtcggtagccttcaccagaccgatgatggcgcgcgcgaaggtcgattttccgcatccggactccccgaccacgcccagcgtttccccttcatacagacgcagcgttacgccatctaccgctttcagcgttttcgacggctgccagaaccactgtttgccgtctttaatatcaaagtgcactttcagatcggcgatttcgagcaggacttttctttgttccgttacggcgttcatagcaaatcccccaccggttgaaagcaggcgcgcaggcggcccggcgcaaactcctccagaggcggagcgctattgcaaatctccatcgcgtgcgggcaacgcggctggaatggacagcctttcggcagacgcagcaggttcggcgggttgcccggaatcgttaacagggcatcgccttctgcgtccaggcgcgggaccgcattgagcaggccaatagaataaggatgagagggatggtagaagacgtcgcgcgcctgaccatattccatcgtgcgtccggcgtacatcaccagcaccttatcgcagatcccggcgacgacgccgagatcgtgggtaatcataatgatcgccgtattgaactcgcgcttgagctcattaagcaatgtcattatttgcgcctgcacggtcacgtccagcgccgttgtcggctcatcggcaatcagcagcttaggccggcacagcagcgccatcgcaatcatgacgcgctggcgcatcccgccggaaaactcgtgcggatacattttcatccgtttgcgcgcctcgggcattttgaccgcatccagcattttcaccgactcttcaaaggcttcggctttgctcagcgctttatgcagcatcaggacttccatcagctgttcgcctacccgcatatacggattaagcgacgtcatcgggtcctgaaaaatcattgagatctgctcggcgcgcagcttattcagctcgcgctccgggaggttaaggatctgcttcccgttaaaggtcgctgaccccccgatacggccgttggcggccagcaggcccatcagcgcaaaagcggtttgcgacttaccggaaccggactcgcctacgatgcctaaggtttcccccgcccgtagattaaaattgagatcgttgaccgcagtcacatcaccatcgggagtcgcaaaggtgacgcggagatctttcacatccagaagcaatccggattgttgtgctgcctgcggcgctttcgccgtttccatcgtactcatgtcggcgctccttagcggtctttcgggtcgagggcatcacgcaggccatcgccgataaagttaaaacaaaacagcgttaccaccagaaaaccggcaggaaacagcagcagccacggcgatacttccattgagttcgcgccatcgctgagcagcgcgccccagctacttaacggctcctgggtacccaggccgaggaagcttaagaaggattcaaacagaatcatgctcgggaccagcagggaggcgtacaccacgaccacgccaagcacgttaggcacgatatggcggataacgatattgccggttgaaacgccgccgacctgcgcggcttcaataaactcttttcgcttcaggcttagggtctgaccgcgaacgatacgcgccatatccagccaggagaccatcccaatggcaacaaaaatcagcaggatattctggccaaagaaggtcaccagcaggatgacgaagaacataaacggaaaggagttgaggatttccagcaggcgcatcatcactgaatccaccttgccgcccagatagccggaaagcgacccgtaaagcgtccccagaatcaccgccaccagcgctgcagccacgccgaccatcagcgagatacgtccgccgatcgccacccgcaccagcaggtcgcggcccgaagagtcggtcccaaagtagtgtccggactccatatcgggggcgctggacatcatgccccagtcagtatcgtaataggaaaactgcgataccatcggcgcgatggtgacaaagagcgcaatgatcaccagcacaatcaggctggcaaccgcagcacggttatgcataaagcggcggcgggcgtcctgccagaggctgcgcccctcgacttccagcttttcactgaagttttccagcgcctcgttgtttttcttacttaacatcatggcgaaccccagcgttagtaacggatcttcggatcgataacggcatacagcacgtcaacaatcgcattaaacagaatagtcaatgcgccaaccagaatggtcagactgagtaccagcgagtagtcgcggttcagcgcgccgttgacgaacagttgaccaattcccggcaggccataaatggtttcaatgaccatcgagccggtaataatgccgacaaacgcgggccccatataggagagcaccggcagcagcgcgggctttaacgcgtgacgcagaataatgcggcgcatcggtaagccttttgcccgggcggtgcgaatgaagttagagtgcagcacttcgatcatcgaaccgcgggtaatacgcgcgatactggcgatataggccagggatagagccaccatgggcaaaatcatatattgcagcgccccgccgttccatccgccgcccggcagccagtgcagcgtaatggcaaatatcatgaccagtaagggcgcgaccacgaaactcggtatcacaaccccggtcattgccacccccattacggcaaagtcccatttcgtattttgcttcaatgccgcaatcactccggcactcacgccaagcaccaccgcgagaaaaaacgcggcgaagcctaatttggcggacaccgggaagctggacgccaccagatcgttgaccgagtaatctttatatttaaaggaaggaccgaaatcaccgtgcgccagctgcttcagataattgaagtactgggtcatgatggggtcatttaaatggtattttgcttcaatattcgccatgacttctggcggcagcgtgcgttcaccggtaaaggggcttcccggcgcaagacgcatcatgaagaaagagatagtaataagaataaatagcgtcggaatcgcttccagacagcgacgtaagataaattttaacattgcccgtaccttctggcgtgtgccttcaatagtgcgatgaaataagacaccgtgaggcaagcggtaacgcctgcctcacgtattgccattagtgcttcacaatgtacatatttcttgtatacgtattatccagcggatctttgccggtatagccaccgacccacggtttaaccaaacgggcgttgacataatagaagaccggtacgatgacggagtctttatccagctgctgctcagattgcgcgtaaaggtccgcgcgtttcgcgtcatcgctggttttcagcgtttcggcgataatcttgtcgaaagccgggctcttataatgcgaggtattgtttgagctgtcgctcagcatcgtattaaggaaggaggtcggttcgttgtagtccgcacaccagccggcgcgcgcaacatcaaaggtgccctgatggcgattatcgaggaaggttttccattcctgattttccagcttcacgtttacgccgaggtttttcttccagatagacgccaccgcgatagccagttttttgtgcagatcggacgtgttatagagcagattgaaagtcagcggcttatcagcgctatagccagcttcggccagcaattttttcgcttcttcattacgtttttcctgcgaccacttgaaccattcaggctcaatcagcttcatgccatcggtgtacggcggcgtatagctgtaggctggcaggtcgccctgattcttcaccttattgacaataatgtcgcgatccagcgccatcttcagcgcagtacgcacgcgaacgtcggtaaacggcgctttctggttattgatttcgtaataataagtgcacagatacggatcgacgtgaacttctttcgggatctcttttttcagtttctggaacagttcgatcggcatgttgttataggtcatatcgatttcgccgctgcggtagcggttgacgtcggtgacttcagaagaaatcggcaggaaggtgacctgattaatcacggttttggcgttatcccagtagttggtattacgctccagaacaatgcgttcgttaacaacccaatcttttaatttatacgcaccattgctgacgatattggccggctgggtccatttgtcaccaaatttctcaatagcggatttaggtacgggtgaaacggatgggtgaacgagcagtttgtagaaatacggcaccggctcgctgagggtcacttcaaaggtatgatcgtccagcgcttttacgcccagatcggtcgcgggttttttcccggcgataatgtcatcaacgttggctaaatggccatactgcagatagcttgcataaggagacgcggttttcggatccgccagacgctgccagctataaacgaaatcttgtgccgtgaccggcgtgccgtcggaccactttgcatctttacgcagatggaaggtccagactttaaaatccttgttgtcccatttttccgcaacgcccgcgaccggatggccgtcgaggtcgctcaccagcagcccttcaaacaaatcgcggttaatattggactccggcacgccttcaattttgtgcggatcgagagactgcacttcggagccattgttacgtaccagcgtttgtttgtccgccagctgtacccctgccggtacatctgccgcaacggcggcgttgatggtcattaacgcagagaggactcctgcggcaaccaggctttttttcgtgatgatggtcatgtgtttgttactccaatcattataattactggctatttaaccagcctgttttctcttttctggattctgaacagtgcaggagtttatgctgctgtcagagagtactgcttgctatcaccgacttatttattacgaccgctcaaacggcagccttgacgtcgattcttgcccccctgtccgggggcgatgtagtcccgatgggctatataataaaaattctcatttgcgtacatattccgctaaagatcacgccggaaagtaccaaaacgctttattgtccgccaatgcaatttgcaaatatgtgaccggattctcttttgtggccttctggcggcgaagatttatcacccctcgcgcatgccagaaatgattaatattctatttatcaatcaattagtataaatatctcgcactatgtgccctgcatcgccgaatagatgcttttttgtacgaaaaattaacaatcgcttattatttagcacattcatctgcttcatgagtgaaattactaatatcatttcaattatcggacggcaagcaccagagaatggtgtgaggaaaataacagtgattaatgtgggtaaaaggtcgcgctcgtggcaaatgaaatggataacttattgataataaataacaatatcaaaacattagaaaatagtatcgcaggtcgataaatcactttttttgatatgttttgctgataatgagcaaacgcggaacacgttgttccgcgcggcaacacaggttaattcacgaggccaggaaagagcgcctttattccggtaacgatgaactcgatgccgagagccatcagcaacagccccataatacgggtaatcacgttaatgccggtttgcccaagcaggcgaaccagccagggggccatacggaaaatgccccagcagcacagcgcgaaaagcgcaatcgcaactgaaaatcccacaaaatgggcgatgctatggtaacgcgtgccccagacaatggttgaactgatggccccgggtcccgccatcaggggaagcgccagcggcacgacgccgatactttcacgaatggccgtttctgatttttcttgcttgttctgtttatcctcgccgagcttgccgctgatcatcgacatggcgatggtgaccaccagaatcccacccgcaatacggaaggagtcaatggaaataccgaagatctggaggatcgcatcgcctaaaaacagcgacgtgagcaagataatggcgaccgacaggttggctgtcaggttggttttattacgcaccgccgccgtctggtagctggtcatactgataaaaaccgggataatgccaaccgggtttaccagcgcaaatagcccaatgaaaaatttaaagtaggctgaaaaatcaaacaatgattgaatcacagggtgctccgcagcatcattaaaaatggctgttgacagttaccggcataaaatatccgcgagaagatacgctgtttgaaagcataattcatccctgttgacgcataagtgcataatttaagctcggatgttagttatttgtttctgcaatgctatttaagtctttaattagcataccgtatcattacgcttgatcaaacaggtcaaaaaatgaactgctgaaaggtatcagcttggctgattattgatttagatcacataaattgtactcagaagtgagtaaccttgtttacacacagaagaggaggcaaagcagcggtacctgaaagaaaaacaaaagcttttttagtcaatcggtgaagtcagaagcacaaaattctttacgttaacatttaaatgcaagccgttaacacactgtctatactgtcgaatcgagctactgattcactaaaaaagtttaacattatcaggagagcattatggctgttactaatgtcgctgaacttaacgcactcgtcgagcgcgtaaaaaaagcccagcgtgaatatgccagtttcactcaagaacaagtagacaaaatcttccgcgccgccgctctggccgctgcagatgctcgaatccctctcgccaagatggccgttgccgaatccggcatgggcatcgtcgaagataaagtgatcaaaaaccactttgcttccgaatacatttataacgcctataaagatgaaaagacctgcggcgtcctgtctgaagatgacaccttcggtaccatcaccatcgctgagccgattggtattatctgcggtatcgtcccgaccactaacccaacttcaaccgctatctttaaatctctgattagcctgaagacccgtaacgccatcatcttctctccgcatccgcgtgctaaagatgcgaccaacaaagcggctgatatcgtactgcaggcagctatcgcagccggtgcgccgaaagatctgattggttggattgaccagccttccgttgaactgtcaaatgcgctgatgcaccatccggatatcaacctgatccttgcgaccggcggtccgggcatggttaaggcggcgtatagctccggtaaacctgccatcggcgtaggcgcaggtaacacgcctgttgttatcgatgaaacggctgatatcaagcgtgccgttgcttccgtcctgatgtctaaaaccttcgataacggcgttatctgtgcttctgagcaatccgttgtggttgtagattccgtatacgatgccgttcgcgaacgtttctccagccacggcggctatctgctgcagggccaggagctgaaggctgttcagaatatcatcctgaaaaacggcgccctgaacgctgcaatcgtaggtcaaccggcgtataaaatcgctgaactggccggcttcaccgtccctgtttccaccaaaattctgattggtgaagtcaccgacgttgatgaaagcgaaccgtttgcccacgaaaaactgtctccgacgctggcaatgtaccgtgcgaagaacttcgaagacgcggttgataaagctgaaaaactggtggcaatgggcggtatcggtcatacctcttgcctgtataccgaccaggacaaccagccagaacgcgttgcttacttcggtcagctgatgaaaaccgcacgtatcctgatcaacacccctgcttctcagggtggtatcggtgacctgtacaacttcaaactcgcaccttccctgactctgggttgtggttcatggggtggtaactccatctctgaaaacgttggtcctaagcacctgatcaacaagaaaaccgttgctaagcgagctgaaaacatgttgtggcacaaacttccgaaatctatctacttccgtcgtggctcactgccaatcgcgctggatgaagtgattactgatggtcacaaacgcgcgctgatcgtgaccgaccgcttcctgttcaacaacggctatgctgaccagatcacctctgtgctgaaagcggctggcgttgaaaccgaagttttctttgaagtggaagctgacccgacgctgaccatcgttcgtaaaggcgctgagctggcgaactccttcaaaccagacgtgattatcgcgctgggcggcggttccccgatggatgcggcgaaaatcatgtgggttatgtacgagcacccggaaacccacttcgaagaactggcgctgcgctttatggatatccgtaaacgtatctacaagttcccgaaaatgggcgtgaaagccaaaatggtcgccatcaccacgacttccggtaccggttctgaagttacgccgttcgccgttgttaccgatgatgcaaccggtcagaaatacccgctggcagactatgccctgactccggatatggcgattgttgatgccaacctggtcatggaaatgccgaagtcactgtgtgctttcggtggtctggatgcggtgactcatgccctggaagcttacgtttccgtactggcttccgagttctctgacggccaggcgctgcaggctctgaaactgctgaaagaaaacctgccagcgtcctaccacgaaggttctaagaacccggtagcgcgtgagcgtgtgcacagtgctgcgaccatcgccggtatcgcgtttgcgaacgccttcctcggggtatgtcactcaatggcgcacaagctgggctctcagttccacattcctcacggtctggcgaacgccctgctgatcagcaacgttattcgctataacgcgaacgacaacccgactaaacagacagcattcagccagtacgaccgcccgcaggcacgtcgtcgctacgctgaaatcgcggaccatctgggtctgactgcaccgggtgaccgtaccgcagcgaaaatcgaaaaactgcttggctggttggacgaaatcaaagctgagctgggtattcctaagtctatccgcgaagctggcgtgcaggaagctgatttcctggcccacgttgacaagctgtctgaagacgcatttgacgaccagtgcaccggcgctaacccgcgctacccgctgatcgctgagctgaaacagattctgctggatacgttctacggacgtaattacgttgaaggcagcgtggaagagaaaaaagaagtcgcgccggctaaagctgagaagaaagcgaaaaaatccgcttaattccacagccgtaaagtcagtaacgctgagccccatcttttgatggggcttttttgtctctgtcgttcagcagccggcaaaacgcctcagacagccgaaacgtataatcaagggccaaaggcttagtaaatgaaaaaaggcgctgtaaaagcgcctgagacgatttaaagggtgggtattagcagctgcgctgtttgttctgcaccgcggtcagagagccttcgctcagcgcctctttataatgtttacggcatacggatacatagcgctcattaccgccaatcaccacctgttccccctcattgtagggccggccttcctgatcgaggcgcaaaaccatactcgccttacggccgcagaaacagatagtttttaattcaaccagcttatcggaccacgcgagcaaatattgactgcccgtaaatagttcgccgcgaaaatccgtccgcaatccatagcacaatacgggaatatcgagctggtccaccacctcggacagctcgcgcacctgctcccgggttaagaactggctctcatcaactaatacgcagtggatgggttgacgcttatgttcgtctgcaatgtcggcaaataacgcagtttgggtattatacaaccgcgccggcgatgagagaccgatcctcgaactcactttccctgaaccaaagcggtcatcaatctctgccgtataaaccaccgtgcgcatccctcgctcctggtaattgtatgatgactgcaacagagcggtggacttgcctgcgttcattgctgaatagtagaaataaagttgtgccatcggccgcgtaaccccaatcaatgtgttttttagcagtaaaattgtatcatatattcacacgctatcagccctcgccgtgcgggtattgccgggaacgttcactcggcggagacctgaaagattaagcctgttaattgaatggtaatgcctgctattcgtacgaccaggcggtcacgcagacgtcactattgcccttttgtgcttatcagccattttcggatagctataaccgcgctggacaagtgttttatattaaacatcatcgtcgctgctgcgctaatacccacaatgatatttatccatgcaaagtataatttttcccactgcgcatcggaaaaagcatactatctcagggttttagcttatcctctccatcatcctataagcgaaaaagatgtgaacccgcacataaaatttaagttaaatgaattaattcccgagacaaataacaagttattttgacttccttacattctcccctattgcacatctgaatttatcgctctattattagtccaacaaaccaccccacaatataagtttgagattactacaatgagcgaagcacttaaaattttgaacaacatccgtactcttcgtgcgcaggcaagagaatgcacccttgaaacgctcgaagaaatgctggaaaaattagaagttgtcgttaacgaacgtcgtgaagaagaaagcgctgcggctgcggaaattgaagaacgcactcgtaaactgcagcaataccgtgaaatgctgatcgctgacggtattgatcctaatgaactgctgagcaccatggcggcagttaaagcgggaactaaaaccaagcgcgctgcacgtccggctaaatacagctacgttgacgaaaatggcgaaactaaaacctggactggtcagggtcgtactccggcagtgatcaagaaagcgatggatgagcaaggtaaatctctggacgatttcctgctgtaataagctatcgtgtccgtttaaaaatcccgctgcggcgggattttttttatccgttattcgggaccggttccgggcgggcataaaaaaaccgggaaacgaatctcgctcccggtttcgcattctaccgcgtacgattacttcgctacggctttatccagccaggctttaaattcagcgcccagggacttgtggcgtacgccatattcaacaaaagcctgcatataacccagcttattaccgcagtcgtggctcttgcctttcatatgataggcttctaccgtttctttttcgatcagcatatcgatggcgtcggtcagctgaatctcatcgccggctcccggaggggttttcgccagcagtggccaaatatccgcgctcagcacgtaacgaccgacaaccgccagattagaaggcgctacgtccgctttcggtttctcgacgacaccaaccatcggtacgctctcacccggctgcagggccaggcccttgcaatcgacaacgccgtatgcggtaacgtcagcaaccggttcaaccatgatctggcttgcgccggtctcatcgaaacgagcgatcatttcggccaggttgtcgcgagacagatcggattcatattcatcaaggataacgtccggtaaaataaccgcaaccggctcatcacccactaccgggtgcgcgcacagcacagcgtggcccagacctttagccagcccctgacggacttgcataatagtcacgtgcggcggacaaatagattggacttcttccagcagctggcgttttacgcgtttttccagcatcgcttccagttcaaaactggtatcgaaatggttttcaatcgagtttttcgaagagtgcgtaaccagaacaatttcggtaatcccggcggcaatacattcgttaacaacatattgaattaatggcttatctaccagcggcagcatttctttcggaatagccttagtagcgggcagcatcctggtgcctaatcccgcaaccgggatgacagcttttcttacttttgaattaagcgcagccattgaaatctcctggactgttcgttttttaaacttctcgttaataatatggtatcgagtatatcagcctgctcagtcaaagctgttccgaaaaggattagatatcttcgaattaggaattttacgcattaaacccggcgatagtaccaccacaaaagatcgcgtggtaatcccacgagcctaaaaataagcacaattgttcactccgtggtcaacatcaggcgtaaacgtccgccagccccccaaatttggcactgccatgatgcgcagcgttgactaatttggttgaggtatgcattacctaaagtacctaacggaacgccattactaatctgaatttgatgttctcccgtattcaaggtgccattcaaacccgcggagactaaaattaaatttttcaaaccgctgtggtaataccctaccaataatgggaattgcccgggtaagtttgcctgccgcagcaattggttaacctgttttagcaggctgcccatctccggcaaacgctgcccctgatgagcgagctgctcctgcagtaacccattaaacagcgcgcgcagcaatagggccgccagaacgccattatcacctgctcgtgtgacatccagacaataaaacgccagatcgttttctgatagcggcgcaatatcgagcacgagtcctggcttatcgacagagacaagctggcgatagtgaatacggcaacgcgacatctcctgctgcaccggcggctggagctcctgaagcagcctcgacgccgcgctaggatcgcttaccagcgcatcccagtcctcaaacaggcgctcttcttcttcgacacgcgaattaaacatattgggatagaggcaggcatacacggtttctcgcaggcgatcgaaatccttaaccggtttgagcaggatatcctgaacgcccaggcgcaacgctttggcgatgtccgccatattttccgtcgctgaaatcatcagaatcggcaactgctcgccctggttacgcacatgttctaccagctgcaggccgttcattcgcggcatggagatatcgcaaatcatcaaatcgggttttgactccgccattttttgcagtgcatccataccatcttccgcctgtacgatggtcgcaccaagcgaagctaaccaggtgtgcataagagagcggaaaacgggttcgtcttcaactatcagaatctgttttcccgccaatggctgcgtcatgatctctcccctgactgacgataatttaatagtggcatgatattcacgctaccgcctgtcagaatttacttaagtatgcatcaaatgcgctccacgggggtacgcactaaaggtaatagttcatccattttcttttccactgccagatgtccggcggcgatagcttcgctggcccggtggaaatcaagcgtggagatttgtggacaaaagggctgaatcaggatatcaggcgggtcgcccgccatacggtttcgcttaaggcgattctccagaacctgaattgacgtcgacatgatttccatcgccgttggcgccctcgtcgcccgacgtgacgtcatacgcgccaggcgagtgcgcagccgcgaatgccacgaaaaatcttcctcgctctccggacgaggcacctccattgacagcaaatcctgctgcatcagatgcgcatcgtgctgcaaatcaacggcaatgacgatatccgcgcccatggcgcgagccagagacaccggcacggggttaaccaccgcgccatccaccagccagtagccattatgcatcaccggcgccatcaaacccggcatactgcaggacgcacggatcgccagatgcagatccccttccgtaaaccacagttcacgaccggtgcttaaattcgttgtgaccgccgcgaacggacgttcgcagcgctcgatctcgctgacgggcatgagtttgcggtattgactaaacacgcgctcgccccgcagcaggccaccccgttgccaggagagatccattaacttcagtacatcccagttactaaaggagcatacccatttctccagggccggaagccgattgcaggcgtacgccgctccgaccagcgagccaatggagcaccctgcgataacatcgacgtcgatacccgtccgccgtaaggcattaatcacgccgatatgcgaccacccgcgagcggcgccagcccctaacgccaggccaattttaagctttctcatgagtaccgaaacatatccttccactccgggcatggcatcatcgccatacctcagttaacataatgcgctttggcggcgtagcgccgtctttctttttcctgtggaggccgttttgtcgccattatgcccctgtggcagcgctctggagtatagctcatgttgtcagccttatctggctggcgcgcagctggcgccagatccgtcacagctgatgcgctcccgctatagcgcgtttgttatgaaagacgccgactatctgattaaaacctggcacccctcctgtcaagcgcagcagtttcgcgcagacctggaaaacggttttacccgcacacagtggcagggtctcaccgtctttgccgccgagacgggcaagaacccggatgaaggctttgtcagctttatcgctcgttacgctgacgataaccgctccggagccattattgaacgatcccgattcttaaaagaaaacggacagtggtattatattgacggcacgcgaccgctaatcggtcgtaacgatccctgcccttgcggttcaggtaaaaaatttaaaaaatgctgcggtcagtaagccagcagcagaaatagcaaacactacaggattttccccgcgatgcattcacaacaacgtaaagtactgcgcactatttgccctgatcagaaaggcctcatcgcgcgtatcactaatatctgctacaagcacgaactgaatatcgtgcagaacaatgagtttgttgaccaccgaaccggccgcttctttatgcgtaccgagctcgagggtattttcaatgattcaatcctgctggcggacctcgacagcgcgctgccggaaggttcaattcgtgaactcaatccagcagggcgccgcagggtcgtcattctggtcaccaaagaggcgcactgcctcggcgatctgctgatgaaagctaactacggcggcctggacgtagaaatcgccgccgtcatcggcaatcacgaaacgctacgctcgctggttgaacggtttgatatccccttccagctggtgagccatgagggtttaactcgcgaagagcatgataaacagatgggcgacgcgatcgccgcccttgagccggattacgttgtgctggcgaaatacatgcgggtcttgaccccagagtttgtctctcgtttcccgaataaaattattaatattcatcactcattcctgccggcttttatcggcgcgcgtccgtatcaccaggcctatgaccgcggggtgaagattattggcgccaccgcacactacgtgaacgataatctggatgaaggcccaatcattatgcaggacgtcattcatgtcgatcatacctacaccgcggaagatatgatgcgcgctggccgcgacgtcgagaaaaacgttctgagccgcgcgctgtatcaggttcttgctcagcgggtatttgtttacggtaaccggacgattattctttaatctcagggaaatgaattgattagctttgcacctttacggataaaaagcaggcaaacagcttcatttccctaaaggaatgctttacaggggcgtctcatttgatatgatgcgccccgcttccagcaggaagctggccagtaaatagcattaccccgtggtggggttcccgagcggccaaagggagcagactgtaaatctgccgtcatcgacttcgaaggttcgaatccttcccccaccaccattctttaccacgttgttgtggtaataccgatgaacgtaaacgatgtttgcacttatcgggaagggtgagaatcttcgaccaaggttcgagtcgagcgaaagcgagacaacgttgccgcaggcaacggcccgaagggtgaggagcgaagcgacgaataatccttcccccaccaccatctctcagcttgacctcaaaatttgaattacccctggtggggttcccgagcggccaaagggagcagactgtaaatctgccgtcatcgacttcgaaggttcgaatccttcccccaccaccatcacttctatgtcgtattgaattcacacttcgctcagtgccccatatccatcccatgcgggaaggatgagaagcttcgactaaggttcgattcgagcggagcgagaaaacgttgccgcaggcaacgacccgaagggcgaggcgcaacgcgccgagtaatccttcccccaccaccatcacttctatgtcgtattgaattcacacttcgctcagtgccccatatccatcccatgcgggaaggatgagaagcttcgactaaggttcgattcgagcggagcgagaaagcgttgccgcaggcaacgacccgaagggcgaggcgcaacgcgccgagtaatccttcccccaccaccatcacttccctgcagtacctcagcaaaatcaaattatcaaaaccgtcttagttagctcttttatttctccagaactgattctgtatttctgccatatgtgccccgccgggagcagaccgcacaaatgaaaaaccctgccgcagcagggtttagctttactcgaaatagaattagcgacgggcgcgaacaatctggtatttgcgcgtcaggtactccaccggcgcgctccagatatgcaccagacgggagaacgggaacagcacaaacagcgtcatgcccagcaccaggtgcacgcggaaaataaacgccacgccgtccaggtgcgaagatgctccgccgtggaaggtcaccaccgactgcgcccagccgaccagcttcatcatttcgctaccgtccatatgctgagcggagaacggaatagtcagcaggcccagggcgcactgcaccatcagcagggagaggatcagaatatccgctccggtggtggtggcgcgcacgcgcgggctcagcagacgacgtttcagcagcagcagaccgcccaccagcgtcatcacgccgcaggcgccgcccgcaatcatcgccatcttctgcttcacgtcgaccggcaggaaggattcgtacatccagtgcggcgtcagcataccgagaaagtgaccggcaaagatccccagaatcccgatatgaaacaggttcgaagccagattcatccctttacggtccagcatctggctggaggccgcacgccaggtatactgcccgtagtcataacgcagccagcttcccaccaggaacaccgtaccggcgatatacggatagatgtcaaagaagaacatattcaggaagtgcattattgctgtcctccgttagagatattcaaatattgcggggcaacggctccggcaaaacgacgctggtgagcggagatctccgactcgccgcagccctgatcggcaaagaatttcacctgttcttcttcccagacggcgtccagcgcctgcggcgtatcgtcgcgggcttcatcggcgattttttccgccactttctggctatcgacctgcgcgttagccagcttgagcagcagctcaaacagcgccgcgtagccgctctcgcgctgctgcaggcgagcgctgagcaggccgagaatcggcgcgacgtcctgcaatccgccgagcgcttccgcttccggcagctgcgccagatactccaggtacagcgggagatgatccggcaattcgcggctatccagctgcagaccgtggcgttcatactgcgccatcaggtcaaccatcgcctggccgcgatcgcgggattcgccgtgcacgtgctcaaacagcagcagcgaggtcgcgcggccgcgatcgaacagttcgctgtagcgagactgcgcgtccagcacatcctgagcggtcaggtcacgcaggaaaacgctcagcttatgggcatcctccggcgcgagcttttccgaagcggcgatagcgtcaaacagctcctgctgatgctgccataaggcagcgtcagggtactcgagaaggcgcgacacaatgacgagttcaatcatgggtgcggctccgttttgctggtgacgtcgatagcatcgatacggcggctgttaaacagattgaactggctgtcagaaccgtggcagccgtcgccgaaggtaaagccgcaaccgtttttctcagggaaggcgtcgcgggcctgctcgcggtggctgctcggcaccacgaaacggtcttcgtagttagcaatagccagatagcgatacatctcctgcgcctgcgcctcagtgaggcctacctcttccagcgcccgggtatccagtacgccgtcgacggtttccgcgcgtttgaagtggcgcatcgccagcatgcgtttcagcgccagcagtaccggctgggtatcgcccgcggtcagcaggttggccagatactgaaccgggatacgcaggctttccacgtccggcagaataccgttgctgcccagttcccctgcgtcggcggccgactgaatcggcgacagcggcggcacgtaccagaccatcggcagggtgcgatattccggatgcagcggcagcgccagcttccagtccatcgccattttgtacaccggcgactgctgggcagcgtcgataacgccctgcggcacgccgtctttcagcgcttgctcaatcactttcgggtcgttcgggttgaggaatacgtccagctgacgctgatacaggtctttctcattctccgtgctggcggcattttcaatggcgtccgcgtcgtacagcagcacgccgaggtagcgaatacgccccacgcaggtttccgagcaaacggtcggcatcccggattcgatacgcgggtagcagaagatgcacttctccgatttcccgctcttccagttgaagtagattttcttgtacggacagccggtgatgcacatacgccagccgcggcacttgtcctggtcgatcagtacgatgccgtcttcttcacgtttgtagatggcgccgctcgggcaggtcgccacgcacgccgggttcaggcagtgctcgcacaggcgcggcagatacatcatgaaggtgttttcgaactggccgtacatcgccttctgcatgttctcaaagttctggtctttggcgcgtttctcgaactcgccgcccagaatttcttcccagtttggaccgctggtgattttttccatccgctggccggtgatcagcgagcgcgggcgggcgatcggctggtgtttgctttccggcgcgttgtgcaggttctggtagtcgtagtcaaacggctcgtagtagtcgtcgatgcccggcagatgcgggttagcaaagattttaccgagcagcatcgcgcggttgcccatgcgcggctgtagcttgccgttgatcttacggatccagccgcccttccacttctcctgattctcccagtcgttcgggaaaccgacgcccggcttactttcaacgttgttgaaccacgcgtactccataccctcgcggctggtccagacgtttttacaggtgaccgagcaggtatggcagccgatgcacttatcgagattcagcaccatgccgacttgtgaacgaattttcattttacgctctcctgtacctggtcgttaccttcgccatctaaccagttaatattcttcatcttacgtaccaccacgaactcatcgcggttcgaccctaccgtgccgtagtagttaaagccgtaggccagctgggcatagccgccgatcatatgggtcggcttcggcgtaatacgggtcacggagttgtggatcccgccgcgctgctcggtgatctcggaacccggcaggtttacgatacgctcctgggcgtggtacatcatggtcatcccggccggcacgcgctggctgaccaccgcgcgggcggtcagcgcgccgttgctgttgaacacctcgatccagtcgttatcctcaatccccagatctttggcgtccgcttcgctcatccacacaatcgggccgccgcgcgacagcgtcagcatcagcaggttgtcgctgtaggtggagtggataccccacttctggtgcggcgtcaggaagttcaacgccttctccgggttgccgttggatttcgcccccatcaccgttttcaccgaacgggtatcaattggcggacgatagaccagcaggctttcgccgaaatcgcgcatccactggtgatcctgatacagctgctggcggccggaaagcgtacgccacgggatcagttcgtgaacgttggtgtagccggcgttataggaaacgtgctcatcttcgagtccggaccaggtcgggctggagataattttgcgcggctgggcctgaatatcgcggaagcggattttttcctcttctttattcgtcgccaggtgcgtatggtcgcgaccggtaaattcgctgagcgccgcccaggctttcaccgccacgtggccgttggtctccggcgccagggtcaggatcatctctgccgcatcaatcgcggtgttaagcatcggctggcctttcgccgggccgtccgctttggtgtagttgagcttgcgcagcagatccatttcgctctgggtattccaggcgatgcctttaccgccgttgccgattttctccatcagcgggccgatagaagtgaagcgttcgtatgtcgccggataatcgcgctcgacggtcagaatatgcggcgcggttttcccaggaatcaggtcacattcgccttttttccagtccttaacgtccagcggctgcgccagttcggcggcggagtcgtgctggataggcagcgtcaccacgtcggtctctttgccgaggtgccccacgcagacttcagagaatttcttcgcgatatctttgtagatatcccagtcgcttttcgattcccaggccgggtcgacggcggctgacagcggatgaataaacggatgcatatccgaggtattcatgtcgtctttttcataccaggtggcggtcggcagcacgatgtcggaatagaggcaggtgctcgacagacggaaatcgagtgtcaccaccagatccagcttgccgtcgagaccgttgtctttccactccacttcttccggcttcacgccgccctgcttaccgagatctttgccctgaataccgttttccgtacccagcaggtacttcagcatgtactcgtggcccttaccggaagagcccagcaggttagaacgccagataaacaggttgcgcggatggtttttaccgttttccggctgctctgcggcaaagcgaatggaaccctctttcagggatttgacggtgtaatcgaccggcgtcatgcccgctttcttcgcctcttccgcgatgcgcagcgggttggtgcccaactgcggcgccgacggcagccagcccatacgctcggcgcgcacgttgaaatcaatcaggtggccgctgtagcgggatttatccgctaacggcgacagcagttcctgcgcggttacggtttcatagcgccactggctggagtggttatagaagtacgacgtgctgttcatatggcgcgccggacgctgccagtcgagagcaaacgccagcggctgccatccggtctgcggacgcagtttttcctggccgacatagtgcgcccagccgccgccgctctgaccgacgcagccgcagaagatcagcatattgataagaccgcgatagttcatatcgaggtggaaccagtggttcagaccggcgccgacaatgatcatcgaacggccgtgggtcttatcggcgttatcggcaaactcccgcgcggtacggataatgtgcgcccgggaaacgccggtgattttctccgcccatgccggggtatacgctttgacgtcgtcgtagctgctggcgcagttttcatcgccaagaccgcgatccagaccgtagttcgccatggtcaggtcgtagacggtggtgaccagcacgctagagccatcggccttctgcaggcgtttgaccggcagtttgtgcagcagcacgttttccagctcgactttattaaagtgctcggtgccttcgccgccaaaatacgggaagccgacgttggcgatatcgtcgtggccgcccagcaggctcaggcgcagctcaacgtcttcaccggttttgccgtcgcgctgttccagattccacttgcctttgtcgccccagcggaagccgatagagccgttcggtacggtgatttcgcccttctcatcaaaggcgacggttttccattccggattcgtttcctgacctaatgcgtccaccagatcagccgcgcgcagcatgcggcccgcggcgtaatagccatcgcgctcttcgagcatcaccagcatcggcatgtcggtgtagcggcgcacgtaatcggtgaaatactggctcggtttgtcgagatggaactcgcgcagcatgacgtggcccatcgccagcgccatcgccgcatcggtaccctgcttcggcgccagccacagatcgcagagcttggcgatttcggcgtagtcgggggtgatggcaacggttttggtacctttgtagcgcacttcggtaaagaagtgggcatccggggtacgggtctgcggtacgttggatccccaggcgataatatagctggagttataccagtcggcggattccggcacgtcggtctgctcgccccaggtctgcggtgacgcaggcggcaggtcgcagtaccagtcgtagaagctcaggcaggtgccgccgatcagcgacagatagcgcgcgccggaggcataggagaccatcgacatcgccggaataggcgagaagcccgccacgcggtccgggccgtaggttttgacggtgtagacgttagaggcggcaatcagctcgttcacttcctgccaggacgaacgcacgaaaccgccgcggccgcgcgcctgcttaaagcttttcgctttgtcggcgtcttcaataatagaggcccaggcatccaccggatcgctgtgctgaactttcgcttcacgccacattttcatcaggcgtttgcgcatcagcggatacttcaggcggttggcgctgtaaagataccaggagtagctggcgccgcgcgggcagccgcgaggctcgtggtttggcatatccggacgggtgcgcggatagtcggtctgctgggtttcccaggtgaccaggccatttttgacataaatcttccagctgcacgaaccggtgcagttgacaccgtgggtggagcgcacaactttatcgtgctgccaacgttgacggtatccatcctcccagtcccggttggtttttagaagctggccgtgcccatcggcaaaggtttcacccttctgtttgaagtagcgaaaccggtccaggaatttactcatcgggtctctcctgtgtggagcctgacggctctctgataaatcgacattgctggatttgcagcgaaggtaacgctatgaaagagggagagaattgataacgatcaagacgatatggcttataaaaacgggttaacacagtaattaccaccaaagtggtatttatttctattttttattttattgattaacaaagatatttttcataaaagcctgcagaaaataaggattagcgattcgccatggtattaaggggtagataccccttaagtcattttttctgtgacttcaggcggcttttaaaattaccccacaccattagtatgttgtaactaagaaataaatactaaaaagggcgcaaataccgttgcgccctttgcagaaactcagaaagaaatattatttctgcttgcgtccgtagactgcccaggtaatcaccacgcaggcgatatagaacaccaggaagaccttcatggcgccggccggtgagccggttaaatccagcgaaataccaaacgcttttggaataaagaagccgccaatcgcgccaatcgccgaaataaagcccagcgccgccgccgtatcggtcgccgcttcacgcatggcctgcgcttcgctgccgccctgcgccttaacgcgatccatggtcattttgcggaagataaccgagatcatctggaaggtagacgcgctgcccagaccggcggtcaggaacagcaccataaataccgcgaagaaggcaataaagttgccgccctcgccgtgggtcggcagcgtcaggaacagcaggccgcagaagatagccataaccacgaagttcaccagcgtcacgcgagtcccgccgaggcggtcggagatcgccccgccggtcgagcgcgccagggcgccgataaacggcccgaagaacgcatagtgcagaatctgcacatccggaaactgggtcttcgacagcatggcgaagcccgccgagaagccgataaacgagccgaaggtggcaagatagagcagcgccataatccacagatgggcgcgcttcagtaccggtagctgctcgctcagcgacgccttcgacgccgacagatcgttcataaagaaccacgccgccagggtgaagataatcaggaacggcacccagatccacgccgcgttttccagatacagcatggaaccgtccggctgctcgctgccggtaccgccaaagacggcgaagatcgacagcgaaaccaccagaggggcaaccagctgcattacgctgacgcccatgttcccgaggccgccgttgatgcccagcgcgccgccctgcttctgcttcggaaagaagaagctgatgttagccatactggaagcaaagttcgcccccgcaaaaccgcagagcagagaaataatcacgaaaacgctgaagggcgtagaggtatcctgtaccgcgaagcctaaccagacgcagggcacgatcatgatcccggtactgaacgcggtccagcgacgtccgccgaacagcggtaccataaacgcgtaaggcacgcgcagcagcgcgccggagagcgccgggagcgcggtcagcataaacaactggtcggtggtaaactgaaagccgactttattcaggttgacggcaacggcgctgaacaacatccagacgcagaatgccagcaaaagacacggaacggagatccacagattgcggctggcgacgcgatgaccgcgctgctgccagaattcaggatcttcgggacgccagtcgctaatgactgaactgttagtcttctccgggattgaagagtgactcatagacacctctaataattcatattaaccctggctaccttatgggttacaggcggcggtaagttgatataaatcaaaggaaaagttggcgctaatttggctaaaaaaaacgcatcacccgaagtgagtagctatttctgcgtaaaaaagtgtggtttttcacgtcagtgctggcattgcccgaacgtctgccaccaatccatcacaccctgacaattaaggggtaatcctttaggggtatgggtatactccaggggatgtccgagaataagcgccactcccggatgatttgccggtcaggagcctcataccccatgttgaaacgtctttttacgccgctaacgctggttaatcaactcgcgttaatcgttctgttagccacggtcatcggcgtcgccggaatggcgatctcttctcgcctggtgcacggcgttcagggcagcgcgcatgcgattaacaaagccggctcgctgcgcatgcagagctaccgcctgctggcggcagtaccgctgggcgaaagcgatcaaaagctgctcgatgaaatgacggcaaccgtttttagcccggaactgcagtacgccgctcgccatgacgatcagcagcgccagcttcaggcgttacagcactactggcagctggagctggcgccggggatgcgcagggcgcaaaatcaggcctcggtcgcgacggatgtcgccggctttgtcgatcgcatcgaccagctggtgaccgctttcgatcacaccactgaggagcggattaaacacgtggtctggatccagcgcatcatggccgtggggatggcgctgctgctggtgtttaccatcgtctggctgcgcgcccgcctgctacgcccgtggaaacagctgctcggcatggcccgagcggtgagccgtcgcgattttacccagcgcgcgcagattagcggacgcaacgagatggcgacgctcggtatggcgctgaacaatatgtctgaagagctggcggagagctattcggtgcttgaacgccgggtgcaggaaaaaaccgccggtctggagcagaaaaacgagatcctcgccttcctgtggcaggccaaccgccgactgcactcgaacgcgccgctctgcgagcgcatttcgcccgttcttaacgggttacaggggctaaccctgctgcgcgatattgaagttcgcgtttacgatatggaagatgaagacaaccatcaggagttttcctgccactccgatattcagtgcgacgacagaggctgctatctgtgtccgcgcgatctgccgccgctgccggataccggcaccaccttaaaatggcggctgtcggatgcccataatcagtacggtattttgctggccaccctgcccgccgggcggcatctgagccacgatcagcagcagctggtggatacgctggttgaacaactcaccggcaccctcgccctcgatcgccatcaggagcgccagcagcagcttatcgtgatggaggagcgcgccactatcgcccgcgagctccacgactccatcgcccagtcgctctcctgtatgaaaatgcaggttagctgcctgcagatgcagggcgacgatctgccggaagcgagccgccagctgctggggcaaatccgtaatgaactcaatacctcctgggcccagctgcgcgaactgctgacaaccttccggctacagctcaccgaaccggggctgcgcccggcgctggaggccagctgccgggaatacagcgcccacttcggtttcacggtacgcctggattatcagctgccgccgcgttttgttccatcgcatcaggccattcatctgctgcaaatcgcccgggaagcgctcagcaacgcgctgaagcacgccaatgccaccgacgtcagcgttaccgtggcgttgcgggacaatcaggtccggctaacggtggccgataacggtcgcggcgtgccggaccatgcggagcgcagcaaccactacggcttgattatcatgcgcgatcgcgcgcagagcctgcgcggggactgtcaggttcggcgtcgggaaaccggcggtaccgaagtggtggtcacttttatccctgaaaaatcgttttcaatccaataaggagaacttcatgagtcaacaggaacgggcaaccatccttctcatcgacgatcacccgatgctgcgcaccggcgtcaaacagctgatcagcatggccccggacatccaggttatcggcgaagccagcaacggcgagcaagggattgcgatggcggaatcattagatcccgatttgattctgctggatctcaatatgccgggcatgaacggtctggaaaccctcgacaagctgcgcgaaaagtcgctttccggccgcgtggtggtatttagcgtttccaatcatgaagaagatgtggtgaccgccctgaaacgcggcgccgacggctacctgctgaaggatatggaaccggaagatctgctgaaggcgctgcagcaggccgcagcaggcgaaatggtgctcagcgaagcgttaaccccggtgctggctgccagcctgcgcgctaatcgcgccacctcggaccgcgacatcagccagctaaccccgcgcgagcgcgatattctcaagctgattgcccagggcctgccgaacaaaatgatcgcccgccgtctggatatcaccgaaagtaccgtcaaagtccacgtcaagcatatgctcaagaaaatgaagctgaaatcgcgcgtggaagcggcggtttgggtccatcaggagcgcgtattttagggcagatgctgccacgacacgccctcggccggtacccgtaccaacggctcagtcagcgccagtgcgatctcattggatgagacgcgctgacccgttttatcctccaccaccagcgaaagatgccagcggttgctcgccccggcttcgctgctccagcgcggcataatcacggtccagccgtccgtactgttcgcctcaattggcgatgtcaggcttagcgcctgggtgtccccctgccagctcagcgacttaatgccgtgcaggctgcgaatctgcagtttcagctgcaccgtctcccccggctgaagatcccagggcggcgtcgccagataaaccgacagcgttttacgctggcgatattcaacgaccggcaggttatcccgttccgggctgtcgtagcggctgccgcgaagcgatcggctaacggcgacttcatcggccgccagctgctgcttcagcgggacgccgaagcgatagttcagcttcagcccgacatcattttggctgacgccgctctcgccctgcttatgcttcgccgtgaccgtcaccagcggaacgggagtgtaattcagccccaccgacaccgcgaccgggttatggtagccggtacccgaatggaacagatcgacgctatcgccaaaatactgctccacgctgacgctggtattaatgtgctgataaaacggcagccgcgcctgggcggtcacatcgtagccgctcgccatacgctgctgctgggtcaggctactcccctgctgccagccgccgagcggctggtagtagttcgccgacaggcgcagcgactcgccccaggcttcggccccgacgctgccgcgcgccatccgatcgtccagggctttatcgtagaaagagttgtagcccagcagccaggagcccatccgccagcgctggccgagaccaatattgccgaccagacccgtatcccgctgggtgaccgagtactgattccaggtaaggtagtcgccgttatcctgcagagggacaaaccagctccctttgctgccggtaaaattgccctctttatccaccagcagatcgacgttggcgttgccccacggcgaaagccagctctccagctggtggctgacctcgttccccagtttaccgatggcaaatactcgcgcctgttcgctggttgtcagcccgttatcgctcatactggcttcgccaaatttcttcgccatctcggcaaagtgctttgcgtcgtcgtcgacctgcggcgccaggccgaggtcgggtaagctctcaggcgcgccggagaacgcctgattatcctgcagcgcgcgggcgggcgcgcctgccagcagcaggagaagcggtaaatacggggttatgcggaacgacaaagagctcaaatcggttacgtctactcacgaagtggtggcggcaaaacctaagtttatcgttttttccccgccctcgcagcctctcgcgcgattccaggaatatgctgaatctcaggcctcaacctgcttcgccgccagcagcgccttaagctccgggagacaggaaccgcagttggtgccgcatttgagtttcgcccccagcgcggcaggcgtacggcagccgctggcaatcgcttcgcctatcgcccgttcgcccacgctaaagcagctgcagataatgcgcccgcgcggcatctcatcgccgccttttctgccgctcaatagtgcatggcgccgggcggcgttctgcggcggggtgcgaaacgcggcgtgaatccactcggcatcgatagccggctcgctggcgtcgctccaccagccgagcatcagctctcccccctgccacgccagcaggttccagacgttgccgccttcggctacctgcatctgccatccctgccgctgacaccagcccacaagccagtcgcgggagcgggtatcccccgccagcgaaagatggataacgccctgcgccgcccgccgccgccagtgcagcgaggcggggagcggaaccggctggcgagcaaaaagctcgcctttccacgccggcagccaggcggctatcgctaccgccgcctgtttactttccggctgcccggagtgcgggtcggtgaccgccctcagcaggttattcacccgtccctggcgagcatactgatcattccagtgcatcggcacaaacagcgacccgggacgctggccagcgctgattgtcacttttgctaccatcaccccattcggtgagcggacccgcgccagttcaccttccagcagctgatagcgcgtcgcgtccgctggcgcgacttccaccaccggttcgctaatatgctgcatcagacgcggcaccgcgccggtgcgggtcatggtgtgccactgatcgcggatccgcccgctgttgaggatcagcggatagaacgcatcggtgaccgcccgagtgggctgtggggtcaccgggaccatgcgcagtttgccgctgcggtgccaccccttgagcaaaccccagcttgcatgactgcggctcaccggccagcgcaccggctccagcgcatcccacgcttcgcggctgagatccgccagtccgccgatgtcaaacgcccgctggccatcgttttcatatcctgaaagcgcggcgtgttcgctgaacacctcgtgcggatgctgccaggcaaaggcggagccgaagcccagcgcctgggccacgcgggcgacgatccaccagtcggctctggcctcccccggcggcggcatgaaagcgcgctggcgtgagatccgccgttcggagttggttaccgtgccgctcttctccccccacgccagcgcgggaaagcggatatgggcaaagcgtccggtatcggtagcggcggcgacgtcggaaacgatgaccagcggacaggccgccagcgcttcgcttaccgcatggctgtccggcagcgacaccaccggattggtgcccataatccacaccgctttcacctcgccgcggccaatggcggcgaacagatccaccgccgtcagccccggcgtttgcgccagacgttcggtcccccagaagcgcgccagacgccgtaaatcatcggtttcaaaattcatatgcgccgccagcatggtcgccagcccacccacctcgcgcccgcccatggcgttaggttgtccggtcagcgaaaaaggcccgcagcccgggcggccaaatttcccgctcgccaggtgaacgttgatgatagcgttgcatttatcgctgccgctggcggattggttaatccccatggtatagagcgtgatggcgcgcggagcggcgataaactcgctatagaaatcggcgacctgctgtcgcggcaggccgcagaactgcgctactttgtcgaggtcccagttccgggcgatagccagcgcctgcggcgcatcgctgaaatcaccgctgatggcgccgctggcggcaatggcgttcagcaggccgacaaacagcccgccgtcgctgccgggagccagcgcaagatgccggtccgcgatatcgcaggtggcggtcctacggggatcaatgaccaccacccgcatctgcggattgtcgcgcttcgcctgcgccagccgctgatagagtaccggatgcgcccaggcggcgttcgacccgaccagcaccaccagatcgctgttttccacgtcctcatagctgcacggcaccacatcagcgcccagcgcccgtttgtagccggtaaccgctgaagacatgcacagccgcgaattggtatcgatatttgccgcgccgataaaccccttcatcagcttattcgccgcgtagtagtcctcggtcagcagctggccggaggcataaaacgccaccgcctgcggcccgtgacggtcgataacctcccgcaggcgcgaacccgccgccgccagcgcctgagtccaggttgcgcgctcgccgtcgacttccgggaagagcaatcttcccgccaggccgacggtttcgcccagcgccgcccccttcacgcacaggcggccaacgtttgccgggtgctgctcatccccgcgtacggtaacctggccatcggcattcaggctggcgataacgccgcagccgactccgcaatagggacacgtggtcctggtttccgtcatcaggaggcctccgcgcgcgccagcagctgctggttgccaacccacactttaccgttctccactttgaccggccaggcgcgtaccgccagttcgccgccgtcgcactggcggccatcgcgcaggcggatacgctgcttatacagaggtgaaatcacgatcggttcgccgcccgcatcgccaagcaggccgcgcgacaaaacgttggcgtcgctgcccggctcgaggttatcgagggcatacacctggtcgccgaagcggaacagcgcaatctgccgctcgccgagcctcgcgccaatccccgcctgctgtggaatagcgtcgagatcgcaaatggcctgccacgggcgggacggcagcgccggttcggcctgcgccgcgaacggggccagctgcggctggccgcgcagggtttgccgctgtacgctttcgtccggctcatcgctgttcacgtaggagcggaacagcgccagccgctgcggatcgttaagggtggtttgccattcgcactggtagctctcgaccacccgcgccatctcctgctccagctcttcgccgatgccgaggctgtcttcgaggatcacgtcgcgcagatagtcgaccccgccctcaaggttatccatccaggtactggtgcgctgcaggcgatccgcggtacgaatgtagaacatcagcaaccgatcaatactgcgaataagggtggcttcatcaagatcgctggcgaacaggtcggcatggcgcggcttcatgccgccgttgccgcaaacgtacaggttccagcccttctccgtggcgataaccccaatatctttcccctgggcttccgcgcattcgcgggtacagccggagacggccattttaattttgtgcggcgcgcgcagccccttgtagcgatgttcgagggtgaccgccaggccggtggaatcctggacgccgtagcggcaccaggtcgaaccgacgcaggatttcaccgtccgcagggatttgccgtaggcgtggccggtttcaaatcccgcctcggccagctcgcgccagattgccgggagctgctccaggcgcgcgccgaacaggtcgatacgctggccgccggtcactttactgtatagctgatagcgtttggcgatctggccgatcgcaatcagcccgtccggcgtcacctctcccgccgccatgcgcggcaccaccgaataggtgccatctttctgaatattggcgaagtagcgatcattggtgtcctgaagcggcagatgcgccggcttcagcagatattcattccagcaggaggccagcaccgaggccaccagaggtttacagacttcacagccgtggccgtgtccatagcgggcaatcagctgttcgaaggtgcggatatggttgacgcgtaccaggtgatagatctcctgccgcgaccacggaaaatgctcgcagatatcctttttgacttcaacgccctgcccggcaagctggtactccatcacctgtttcaccagcgcgctacagccgccgcagccggtcgccgctttagtgcagctttttatcgccgccatatcgcccgcgccgccgctcaccgcctggcagatatcgcctttgctgacgttgtgacaggagcaaatctgcgcgctgtccggcagcgccgctaccccgagcgcttttggcgcgctgccctcacgcgccggaaggatcaggctttccgggtgtttgggtaaagccatcccgttaagcatcatctgtagcagcgtggcatagtcgctggcatccccgaccagcaccccgccgagcagttttttgccctccgcgctgaccacgatttttttgtagatctgctgcggcccatcagtccactgatagctctgacagcccggcgtgcgcccctgggcgtcgccgaacgaggcgacatcgacgcccagcagcttaagcttagtgctcatatccgcgccgctaaagcagcccgcctcacccgccagggtggccgccgcggcccgcgccatctgatagccgggcgccaccagaccataaattttgttctcccacagggcgcattcgccgatcgccagtacgtccgggtcggaggtacggcactggttgtcgatgcatatgccgccgcgttcgcctacgttcagtccgccgctgcgcgccagcgcgtcctgggggcgaatacctgcggagaataccagcatatcagtcgccagcgagctgccgtcagcgaagttcagctgcagcccctgctcattgcgaacaatttccgtcgtcgccttgctggtatgcaccccgacacccagttggctgattttttcccgcagcatcgcagcgccgccgttgtccagctgcaccgccatcaggttcggcgcaaactcgacaacgtgagtttccagccccagctgcttcagcgcgttggccgcttccagcccgagcaggccgccgccgatcaccacaccccgtcgggcggttgcggcgcgggcggcaatctggtcgaggtcgtctagcgtacgataaacaaaacagccctcgagattatgacccggcaccggcggaacaaacgggtaagaccccgtcgccagcaccagcttatcccagtgggtttcgtggccgaaggcatcgcgcaccacccgcgcttcgcggtcgatgctggcgaccgattcgctcaggcgcagctcaataccgtgctgagcgaaaaaatcgccctcaaccagcgacagcgattccgcgctgcgtccggcgaaatattcagtcagatgaacccggtcgtaagcggcatagcgctcctcgcagaacaccacaatccgatactgttgatgaaggtgacggtcgacgcattgctcaagaaaatggtggccgaccataccgtgtccgaccagcactaatacaggttttgtcatcgtagtatgtcccgcagcgcgcggctgcatcgttgaagagggatcgaagagccactctgccggcgccggcgcatgcgcccccagcagagcggtgaggggcgcggcgctgctgcaatcgcccagcagcagtacgccgcgcagcttgccgtcgcgcagcagcaggcgacggtagtggcggtccagcggatcccagctggtatatacgtcatcctgttcggcggcccgcagctcgccggcgctgaagagctcaatgccggtgaccttcaggcgagtgccgctgtcctgccagctgaaatcctcgccaggggtcgcgcacaggcggtccgccagcacctccgcctggcgcagacatggcgccaccagcccccaggtctgaccgtcgatttcacagcactcgccgatggcgctgacgcccggctgcgcggttgccagctggcggtcaacgaggatgccgcgggcgcaggccagcccgctgcgctcggccagccgtttgttcggctgcacgccggtcgccagcaccacccgcgaggcggcaaacgcgcgcccgtcctccagccgcacctgatgttcatcaatggcggcgatacggctctccatcacgcagcgaatcccgcgctcggcaagcagcatttgcagctgctcgccggcaaaagcatcgatttgctgctccatcagcccgcttccgcgatggagtaaagtgacactgtcaccatgacgccgcagcgccgcggcggcctctacgccgagtacgccgccgccaatgaccaccgccgggccgtcgatggccaggatgccctcaacgtccgccagggtgcggaaagcaaaaacgtgcggctgggtgatgcccggcagcggcggcagaaacggcagtgagccggtggcgaacaccagctcatcccagcccagttcgcctgcggtggtttgcagcgtacgggccgcaatatccaccgccgtaaccgtttcaccggcgcgtaccgtcacgttatgccgcggataccatgacgcgggcagcagcagcgtctcgcttgccgctttttcggcgccaagcaccggcgacagctgaatgcggttataggcctggcacggctcatcgccgatgagggtgatgctaaaccgctgcgcatcgcgctccaccagcgcctgcgccaggcgcgtggccgccataccgttgccaataatcaccagttgccgcctcatcgccgccccctatgccgctttcggctgtttttcatagaggaagtgcaggatctgctggcgcagatggtgatagcggctatcgtccgccagctgcacgcgatggcgcggtcgcggcagattgacgtcgaggatctccccgaccgtcgccgccggaccgttggtcatcatcagcacccggtcggaaagcagcaccgcttcatcaacgtcatgggtaatcatgacgatggtggtattcagcgactgctggatctgcatcaccgcgtcctgtaaatgcgcccgcgtcagggcatcaagggcgccaaagggttcatccagcagcagcactttcggtttcatcgccagcgcccgggcaatgccaacgcgctgcttcatgccgccggagatttctcccgggcgcttgtgcagggcgtgccccatctgtacccgctcgaggttgtgctcaatccactctttgcgctcgcctttgctcatgctgcggcgaaagacctgatccaccgccagcgccacgttgtcaaaacaggtcagccacggcagcagggagtggttctgaaacaccaccacgcgttccggccccggcccggcgatttcacggttgtcgcacagcaggccgccttccgtcggcagggctatcccggctatcagattcagcagggttgatttaccgcagccggagtggccgatcaggctgatggtctccccttcgtagatgtcgaaggagacgttctgcaatgccaggaattcgccgctggcggtgttaaaacgctggctgacgccctggacctgaattaatggtttcatctgcgactccctatttttcctgccagctaaaacgacgggcgagcagcatcagcccctgttccagcagcagcccgaccacgccgataatgacgatggcgatgatgatgttttcgacgttgaggttgttccactcgttccagatccagaagccgatccctaagccgccggtgagcatttcggcggcgacaatcaccagccaggcgataccgatggagagacgaaccccggtcagcaccgcgggcaataccgccggaaagaggatcttgcgcatcaccgtccactccgacagctgcagcacccgggcgacgttgaggtaatcttccggaatgcgccgcacgccctcggcggtgttaatgaccatcggccagatcgagcagataaaaatagtccagctggaggcgggttccgctttctggaacagcagcaggccgatgggcagccaggccagcgggctgaccgggcgcagcagcgcgatcagcgggttaaacatgcgggcgaaaaacagcgagcggccaatcaggaagccgagcggaattcccgccagcgcggcaaggccaaatcccaccgccacccgctgcagcgacgccagcacgttccagccgatgcccatatcgttcggcccgtcctgataaaacgggtcggcgaaaagggttagcgcggaatccagcgtgctgagcggcgtcggaaagcctttgctgttcatcgccgccagctgccagcccagcagcagcaatcccagcccgagcagcggcggcagaagacgttgggtgacatcccgcagccagcggctgagcggaggcgtggttttgcgcacctgcagcggcggcagggtaatgacttcgccgggcgcgctgtcggcgccggcctgcggttgcggtttatatgcgtgtttcatctcatgcccccttacgttgaatcgcgaaactgcgggcgtagccttccggatcggccccattccagaccttgccatcgatcagcgtgctgctgcgcatcgcctgcgtcggcgcgctgatgccgccgaccgcctgcgcggcctctttccagacgtcaatccggttaatgcgctgggccaccgccagataatccggtgccgacttcagcaatccccaacggcggaactgggtcaaaaaccacatgccgtccgagagccacggaaaactcacttctccccgttcgtagaagcgcatcgggtgcgcgtcctgccagcggcggccgataccgttgtcgtattcgccgagcatgcgcccgctgaggtactgctctttggtgttcagccacgcgcgtctggcgagaaggcgcgccgtttcgcgggtgttctcggcggatgcgtcaatccagcgctgggcctctatcagcgccgccaccagcgcgcgcgcggtgttgggatgacgctcaacccattcgctgcgggtgccgagtaattttttccggatgctccggccagatatcctgcgaagtggcggcggtgaagccgatacgatcgtttatcgcgcgcgcattccacggttcgccgacgcaaaagccgctcatattgccgatgcgcatgttcattaccatctgcggcggcggcacaacgacggtgcgaatatcgtcaaagggattaattccaccgctcgccagccagtagtagagccacatcgcgtgagtgccggttgggaaggtgtgggcgaaggtgtagctgcccggcgcctgctggtcgatcagttttttcagcccgcccaggtcggtgacgcccttctcctgcagctcgctggagagcgttatcgcctgaccgttgcggttaagggtcatcagattggccatcgcctgcggtttactggcgatccccagctcaaggccgtagagcatgccgtacagaatgtgcgcggcgtccagctccccggcaaccagcttgtcgcgcaccgccgcccagctggcctccttgctcgggacgagggtgatgccgtactttttatcgaatcccttcagggaagcgatggctaagggggcgcagtcggtcagcggaataaaaccgacccgcacggtagtctgttccggcttatccgaccctgccgcccatgccgcctgcatcatgccggggagcagcatcgcgccgcccagcgccgcccccgcctgtaataaacgccgccgtgaaattgaaaacgtatcgcccatacccgctccagaaacgcgcaaaaaaaaagcgtccggcggtgcttacgcaccgctggacgcctttatccttagacatacgtgccgccgttggcccgctgccctaaacctttattcactcgttttatttaatgcaaagccaatgccagatttgcggaggcccggttcacgcgcgttggctcatttgccgggggcgtttgaggcaaaaactgcaccgtcggctggcaacatatgcccactgattgtgcatctactccttaggtggtacttgccatagcgacttcaccgtcagcagcgcgcgggctatctcaaccatgcgctgatttttgtccatcgccattttacgcagcgcctgccaggcctgctcctcctgcattccctggtgggtcatcagcacgcttttggctttttcaatcagcttgcgctcttcaagcgcatcttttaacgacgcgagctgggcggagagctgctgtagctcatgggcctgctggcgcaccagcggcaacagctgcttatccagccgcagggctataccgtcctcctgccagtcggcgggcggcacctggacctcccgatcgtctccctccagcagcgcatcggccgcgttaagcaggtctgcgatcagccgctcttccacgccgcgcagctgctcaagacgctgggtctgaacgcaaaaccagcgcagagccgtttctccctcgtccggcggcggctggcgggtgcaggcgacccgccgcagctgttcaatttccagaccggcctggcactgttcaacaaacagaacggtttgcggcgaactggctaaagcctgaaaagtgtcaaaacagggctgctggccgtcaatgcggtccaccagctgctggcgcagctcatcgctgaactgtccgcgagcaaagcccagcgcgcccagcgcgcgctcctgtccgaccagctctttcccctgcataaagctgtaaagcgcgaccatccgcccggcgatttgcggatcgtcgatactgtcgttgagctgcggaacgatattcaacaggtggcggataatgcggctaaactgcccggtggcctcttctgcggcaatctccaggccgcgcacgcatttacgcaacgcgacaagctgcgtcagataccacaccgcgcaggcaattcgccagcagagcgcgctgctggcggcatcgcgggcaggttccagcgccgcataaaaccgcgtgagctgctcatcaaccagcgccgcgcccgcccggcactccgccgcgtatagtctgccgcccgagcatagccagatatttgacgcgccgcgctcgcactgcagcatatgcaccagcgcgcttatctggcctgccagcgccccctgctgcgccagctggtgcagctgccgcttctgtaagcgacgcgcgcgcgcaaaccagtcgaccacctcaggtgtattacccgccacattattcatacccttcccccgggttaacgctttatacttcagccaagcaataaccgtgccttatagaaggagtccttatgcaacgtattgtgattatcgctaacggtgccgcctacggcagcgaatccctgttcaatagcctgcgtctggctatcgccctgcgcgagcagcagtctgacctcgaactgaaattatttttaatgtctgatgcggtgaccgccggcctgcgcggacagaagccagcggaaggctacaacattcagcagatgctggagatcctcaccgcgcaaaacgtgccggtgaagctgtgtaaaacctgcgctgacggccgggggatcggcgcgctgccgctgattgatggcgtggagattggcaccctcgtcgagctggcgcagtggacgctggcggcggataaagtcctgaccttctaaaaatccgccattcaacgggattaaatattaagctggcggcgtttgttaaccgaaaacaatgtcagctgaatgctttcaggcacaacgtcatttttgtttaatctttattcctttttttgatcaaaatcagcatctgcccccctcccctttggtgttatgcacagagcaaagtgtgaacaatatcacgcgggttaatgggctggcaggatgctgtagacagaaacggggtcgagattaaatggcaatggtaaaagcaagtttaacgttgtttggcggtgatacgttggtggtgcgttgttccgaacgctgccacattcacctgatgagcgccaaagtgcctggcgatagtcatgcggatattctgagcgtgcaggacagagatagcgcgtatctgaccgtgccttacagcggcacctggaacgttctcatcgacagccacagccagtcgctggagcactccatcagctacgttcccgcctgatagcaaacgcccggggaaacccgggcgatatactcttaagccagcccgggctggctgctttcccccagtagatgacgcaccttgccgactaaatcgtcgaggcaggcatcgtacatcccgagtttccgcagctcctgatcgagcgagaacagatactgagcgttggtgccaagcgggccgctggcgcgggctatcagcggcgcaatcacctgcgcgctggtatccgcctcaaacagcggatgacgcgggtccataataaaaactaatgcattgacggtgcggccatcgtccagatccagcttgcaccaggtcggcaggtagcagccggtgatcatctcccgcttccacagcagggtcagctcttcttcgagagtgtcatcaggcaggcggtaggcaaccccggtggtgcgcccgccctctttcaacgccagcattcgacccggctgagtggcgctaccgcgcccggcggtgagccgcaggcaaaacgcgcggtgccagcccggtagcgtaccggtacaggactcgcgatactccagcgccggattccacatcagcgaaccgtagccaaagatccacaccgagccatcgtccggacgacaggccagggtcgccgccaaagaggctgcccgctgctctgccgaccaaagaagcgattcctcaatagcgccaaacgccgttttacaatccgcattcagtaagaaatcacgcgttaacactttctactacctccgccactgcccgcttcccggcgattatctggtgccatccgtgaagtattgccgaattattatccagctttatttgacaataagcaatgaacgagccgcgggcaagggctcaggcagcacatgacgtagcaaaagcgattacttcttcttatgccacttatcatcatcgcctttttggtactcatttttcaccgccgcccaggcgactttgtgcgccgtctcttcacggctggcgtcatcgcgtcggtcttctttatgcttatactggtcccaggcgctgttaaaggcctctttgtaaatctcctgggcatgcgcaggcagaacgtgctgaacgctgtcgggtaattcacttttgttgctatagggcatggcgacctccagatttagggtgaatagtcagtctgtcaggcgatttaccggctggcaaggcgatggataaatgagaaagatgttttagtaattatctgaataataaatacaaaacgagagtaaccgcagtttatggcaatctaccacttttccatggtcagagtggtaaatttaagtaaaaaacaaagtagttcgatcaatgtctgttattttattaacttacagtatctataattataacacctgcacacctggagataattcatgaccgatgcacatgaggcggtgaaaacccgccacaaggagaccaccctcgcctttccggttctggcgctggcggtgctgtttttctggggaagcagccagtcactgccagtggtcgttgccattaatatcctggcgctggtcgggatcctgagcagcgcgttcagcgttgttcgccacgccgacgttctggcgcaccgccttggcgaaccctatggttcgttaattttaagcctttcagtggttattctcgaagtcagcctgatttccgcattaatggccaccggcgacgccgcgccgaccctgatgcgagatacgctttattcaatcatcatgattgttaccggcgggctggtaggtttttctttattgttgggcgggcgcaaattcgccacccagtatatgaatctgttcggccttaaacagtacctcatcgccctctttccgctggcgatcatcgtcctggtctttcccatggcgctgcccggggctaatttcaccactggccaggcgctgctggttgcgctgatctccgccgccatgtacggcgtgttcctgctgattcaaacgaaaacgcaccagagcctgtttgtttacgaacacgaggatgacggcgacgacgatgacccgcatcacggcaaaccgtcggcccatagcagcaagtggcacaccgcctggctgctggtacacctggttgcggttatcgccgtgactaaaatgaacgccaatccgctggagacgctgctgaccagcatgaatgcccccgtcgcctttaccggcttcctggtcgcgctgctgatcctctctccggaaggccttggcgcgctgaaagcggtcctgaacaatcaggtccagcgggcgatgaacctgttcttcggctccgtgctggccaccatttccctgacggtaccggtggtgacgcttatcgccttcctcaccggcaacgaactgcgctttggccttggcgcgccggaaatggtggtgatggtcgcctcgctgctgctgtgccagatatcgttctctaccgggcgtaccaatgtgctaaacggcgcggcgcacctggcgctgttcgccgcctacctgatgaccatttttgcctgaacctcccccggcggcgtcatgccgttcggggagatcaaaaaagcctgccggttataaaaccggcaggcttttgtcgtttcagcagcgattacttgctggtatcgagctcatcaaagcttttaacaagatcgtcgatggctttcatctgcttgaggaacggctccagtttatccagcggcagcgcggacggaccgtcgcatttcgcgtgttccggatccgggtgcgcttcaataaacaggccggcgatacccaccgccatcccggcgcgcgccagttcggcaacctgcgcgcggcgtccgccggaagcggcgccaaacgggtcgcggcactgcagagcgtgagtaacgtcgaagataaccggtgagttattggaggcctttttcatcacgccaaagcccagcatgtcgaccaccaggttatcgtagccgaagttcgcgccgcgatcgcaaaggatcactttgtcgttgccgccttcgataaacttatcgacgatattgcccatttggcccgggctcacgaactgcggttttttcacgttgatcaccgcgccggttttcgccatcgcttcaaccagatcggtctgacgggcaaggaacgctggcagctgaataacgtccaccacgtcagcgaccggctgagcctggctggcttcgtgaacgtcggtgatgattttcacgccgaacgtttgtttcagctcctggaaaatcttcatcccttcttccagccccggcccgcgataggagtggatggaagaacggttagctttatcaaaagaggctttaaacacataaggaatgcccagcttctgcgtgacggtcacgtagtgttcgcagatacgcatcgccagatcgcgggattccagcacgttcatgccaccaaacagcacgaatggcaggtcgtttgctacgttgatatcaccaatgctaaccactttttgtttcataagttcgccttatcagggtgtaaccggaatggtttcagactaatgcaatgtaatttgtttgtgcgaaatggtgttgatctgcgcgcggatcatctcgctgatgggatcctccgggcactgttcaacgaagtaactgaggtcctgcagcgccacgtgatcgcaatccagctgggcgtatatcagtccccggtcgcgaatttcgtacgggtcttccggattgaactgcagcagcgcttcgctggtccgtaacgccagctccatctgccgctcttccatcagcgccgatttgagcgtgtcgagcagcttgcggatcacttccgcgttgtcggcttcatcgaggtcttcgttaaacaactcggcgaccggactaatattgcccttcagccacacttccagcgtatgctcgttgagcgtttcgccgttaaatggattaatgagccacatctcttcgctctcttcagggtcggcgcgcagcagcatctgggtcggaaaaatcaccggcaccaccggcagcgccagacgctgagcaatccacagcaggattgcgcctagcgataccgcgctaccctgacgattgttcaggactttatcaagccagagcacgtcggacaggcggtaaacgccgcgcgaatcgctaaagccccagtcatgatagaaaagctccagcagacgttctatctggcgctcctggtcccacgaagcggcaatctcctcacgcgccaggcccagcagccgctccagctcatcctgcacatagtgcgtcggaaaatcgtcgcggattaattcagaaatgaggaccatgccgtcgcataacggcgctttattaaattcgaaatcagctaacgacctcatgccttaccccagtaacggtgttcttgtgatggcgagttgaataatgataaacaacaccaccagggccagcagaaaggcgacaaaccggctctgctgactgcgctggcgacgacggcccagcgcgataaatcccaatgcgatataaatgataacgccaaacagcttctcagtcagccatgtaccctcttcggtaaacggcagatagtgcgttattgccattagtccggcgccgctgagaaacagcagcgtatcgctacagtgcggcgcgatacgaacccagcgctggtcaagcagacggttaccgctccagctccaccagtagcgcagcacgaacaggctcaccgaaaccaccacgcaggcgatatgcagatacagtaccgcgttaaacagattcatacgcctccctgatattgcccgagcgtcagacgctcgttgtctccgtagtcgcgacaggtggcaatattgccataacccgccgcgcgaaagattgcgcgcaccgcttccccctgcgtccagccgtgttccagcagcatcacgccgccggcagccagatagcggcggccttcgcggatgatatgcgccagatcggccagaccgccatcggcggcgaccagcgccgttttcggctcaaagcgcacatcaccctgcgcaagatgcgggtcggtttcatcgatatagggcggattgctgacgatgatgtcgaactgctgaccggcgagcgcgctaaaccagtggctttgcagtatcctgacgttagggatagcgagatgttcagcgttacgcgccgccagcgccaccgcgtcgggcattacgtcaacggcggtgacgtggcaatcggggcgttcgctggccagcgccagagcgatggcgccggtgccggtgccgagatcgagaatacggcacggcttgtcggataaccgcgccagcgtctgttcaaccaggcattcggtatccggacgcgggatcagcgtggcgggagaaacgaacagcggcagcgaccagaattcgcgctggcccaccagatgagccaccggctcgccccgggcgcgacggctgagcagcgtttccagctcggcggcctgcgccgccgtcagcgccgtttcgccaaaggcgagaatataggtccgcgctttgccggtcacgtgacccagcaggatttcggcatcccggcgcgggctttcactttggctcaggcggacgatggcctgcgtcagccactgctgaaaagtcatcattcctgctcggaaagggcggccagctgatcggcctgatattcctgaacgatcggctcaatcagcatatccagcttgccttccatcgcttcgtccagacggtaaagcgtcaggttgatgcggtgatcggtcacgcggccctgcggaaagttataggtgcggttacgatcgctgcgatcgccgctgcccagcaggttacggcgctctgaggcttccgcctgctggcgcctggagacttccgcggcgcgaatacgcgcgccaagcaccgacagcgctttggctttgtttttgtgctgagaacgttcgtcctgacactcgacgacgatgccggtcggcaggtgggtaatacggatcgccgagtcggtggtgttaacgtgctgaccgcccgcgccggaggagcggaaggtatcgatgcgcagatcgctcgggttgatatccggcatttcggcttccggcagctccggcatcaccgccacggtgcaggcggaggtatggatacgcccctgggattcggtggccggtacgcgctgtacgcgatggccgccggattcgaacttcagtcgcccatagacgccgtcgccgctgattttggcaatcacttctttaaagccgccgtgctcgccttcgttggcgctcatgatttccacgcgccagcggcgtgattccgcgtaacggctgtacatacggaacagatcgcccgcgaacagcgccgcttcatcgccgccggtaccggcgcgaacttcaacaaacgcgttacgctcgtcgtccgggtcttttggcagcagcagaacctgcagctgctgctccatctgctcacccttttctttcgcttcgcgcagctcttcctgcgccatttcgcgcatttccgggtcgtcgagcatcatctgcgcggcttcgatatcatcctgcagctgacgccagtcggtgtagcagcgggcgacgtcgctcagctgtgcgtattcgcgcgacaatgcgcgaaatttatcctgatcggcgatggttgcggcatcgccgagtagcgcctgaacttcctcatggcgttcgtaaagggcttccagtttggcaacaatagaaggcttcataggcgtgaattcaccctgtcctaaaaagagagaaaggtgcgctattccagcccgaggctgttgcgcagaatatgcaggcgttcatcatccccgtcacgggcggcctgctgaagagatttggttggcgagtggatcaggcggttagtcagcttacgcgccagatcctgcatgatttcctgcgcatcgccgccctgattgagcgcagccagcgcttttgccgtcagctcctcgcggacctgttcggcctgggagcgatattcgcggatagtctcgctggcgctctgagcgcgcagccaggccataaattcgctggcttcctgctcgacaatggtttccgcctgtaccgccgcggctttacgctgcgccagattgtgctgaatgatgttttgcagatcgtccacgctgtaaagataggcgttcgccagcttgccaacctccggttcgacatcgcgcggaacggcgatatccaccagcagcatcggctgattgcggcgcgccttcagcgcgcgctccaccatccctttgccaataatcggcagcgggctggcggtagaactaataatgatatccgcttcttttagccgttcgtcgatatcgctcagggcgatcacctccgcgccgacttcatcggccagcgcctgagcgcgctcgcgggtgcggttagcaatcaccatcttgcgcaccttatgctcgcgcagatggcgggccaccagctcgatagtctcaccggcgccaaccagcagcacggtcacgctggagagtgattcgaagatttgtcgcgccagggtacaggcggcaaacgccacggagaccgcgctggcgccgatatcggtttcggtacgcacgcgtttggccaccgagaacgacttctggaacatgcgctccagctcgctaacgttcaggtgaccacggctggagtcggcaaaggcttttttcacctgcccgaggatctgcggctcgcccagcaccagcgaatccaggccgctggcgacgcgcatcagatggctaaccgcctcgttgtcctgatgccagtagaggcttttgcgcaggtcgtcttcatttaaaccgtggtagtcgcacagccagcggataagcacttcctgaaggttatcctgctcttcgacgctgagatagagttccgtgcggttacaggtcgacagcaccaccccgccctgcaccattggctgggccagcaagctctccagcgcctgatcgagcgtatccggcgaaaacgttacgcgttctcgcagcgctacaggagctgttttgtggttaatgccaagagctaaaagcgtcattgtgagggagtagtaccagcgttgctaaggttagtctgcaggcatcatacaggatgcgcgtaatcaataaaagagaggctccccttttggagtaatagctaatctgtaatagccattaacggtaattttttgatttcagacaacttgaacgtagacgctaccgtccggcaacgctagcattaatggttataattgtaacccgctacacaaatcggccgcctgtttctcccattcgccgcatttcactgtagacatcaaggatttgtcatcattatgaatcgactgttccgcctgttgccgctggcaagcctcgttctgaccgcctgtgcgattaatgctccgaaagggccgggtaaaagcccggattctccacagtggcgtcagcaccagcaagatgtccgcaatcttaatcagttccagacgcgcggcgcttttgcttatctttctgatgagcaaaaagtctatgcccgcttcttctggcagcaaaccggccaggaccgctaccgcctgctgctgactaaccccctcggcagcaccgagctgtcgttaaccgcccagccgggcagcgtgcagctgattgacaataaaggccagacctacacggcgaccgatgccgaagagatgattggccgcctgaccggcatgccgattccgctcaacagcctgcgccagtggattattggcctgccgggcgaggccaccgactactcgcttgacgaccagtaccgcctgcgcgagctgaactacacgcaaaacggcaaaacctggcacgtcacctacggtggctacacctcggacaccaaaccttcgctaccggccaatatggagcttaacgacggcagtcagcgcatcaagctgaaaatggataactggattgtgaaatgatgacccgctggccttctcccgcaaagctgaatctgtttttgtatattaccgggcagcgcgccgacggttaccacaccctgcagacgctgtttcagtttctggattatggcgacacgctgacgattgaaccgcgcgacgatggccagctgcgtctgctgacgccggttgacggcgtgccggatgaagagaacctgattattcgcgcggccaggcttttaatgcaggccgcagcccaggccgggaagcttcctgcgggcagcggcgccgatatcagcatcgacaaggttcttccgatgggcggcggcctcggcggcggttcgtccaacgccgcgaccgtactggtggcgctgaatcacttatggggctgccatctctcggaagatgagctggcggcgttgggtctgcagctgggcgccgacgtgccggtgttcgtgcgcggccatgcggcctttgccgaaggcgtcggggaaattctcaccccggccgaaccggaggaaaagtggtatctggtggcccatccgggagtgagcattcccacgccgatcatttttcgcgatccggaactcccgcgcaataccccgtcaaggtcaattaatacgttattaaaatgtaaattcggcaatgattgcgaggttatcgcaagaaaacgttttcgtgaggttgatgcagcgctttcctggctgttagaatatgcgccgtcgcgcctgactggcaccggtgcatgtgtgtttgctgaatttgacactgaatccgccgctcgtcaggtgcttgaaaaagccccggcatggctgcatggcttcgtagcgcgaggtgttaatatctctccgctcaagcaggcgctgcgctaagttctgctcattatagcaaatttggtgaaaacgccggggaaactgagttacggtgacaacgtcaccctgttccagacgttgcatcgggctctttaaatacaccgcctggatgaaatcgtgcccacccgcaccgtttttggcccatttcatccaccactggacgcatgcctgaggttcttctcgtgcctgatatgaagctttttgctggtaacgccaccccggaactagcacaacgtattgccaaccgcctgtacacttctcttggcgacgccgctgtaggtcgttttagcgacggcgaagtcagcgtacaaatcaatgaaaacgtacgcggtggtgatattttcatcatccagtccacttgtgctcccaccaacgacaacctgatggaactggttgttatggttgatgctctgcgtcgtgcttcggcaggtcgtatcaccgctgttatcccctacttcggttatgctcgccaggaccgtcgtgttcgttctgctcgtgtgcctatcaccgcgaaagtggttgctgacttcctgtccagcgtcggcgttgaccgcgttctgaccgttgacctgcacgcagaacaaattcagggcttctttgacgttccggtggataacgtattcggcagcccgatcctgctggaagatatgctgcagctgaacctggataaccctatcgtggtttctccggacatcggcggcgtggttcgcgctcgcgctatcgccaagctgctgaacgataccgatatggctatcatcgacaaacgccgtccgcgcgctaacgtttctcaggtgatgcacatcatcggtgacgtcgccggccgtgactgcgtaatggttgacgatatgatcgatactggcggtaccctgtgtaaagctgcggaagcgctgaaagagcgcggcgcgaaacgcgtattcgcctacgccacgcacccgatcttctccggcaacgccatccagaacatcaaaaactctgtgattgacgaattcgtcgtctgcgatactattccgctgacgccggaaatcaaagcgctggaaaaggtacgtactctgacgctgtctggtatgctggccgaagcgattcgtcgtatcagcaacgaagaatctatctctgctatgttcgaacattaatcgagcccggctcaaaaacccgctgcggcgggtttttttgtctctgaaccttttattctccacaaaatcattcggcatgcgtcaaggcggcaagtgaatgaatctccggctgcgtacaggcagtacgagatcggggtaaatgaacgcagccaacacagaggcatcccgaaggatgacgtggaaatgaccgatgcctccttcacctgccatttagttgacagatgatgcgctcatggatgaaacattattgtgaacagattattttcctcacatgtgatgcctttccgcgccctcatcgacgcttgttggaaagaaaaatataccgcttcgcggtttactcgtgatgtgattgccgggattaccgtcgggattatcgctatcccgctggcgatggcgctggcaattggcagcggggtggcgccgcagtacggtctctatacctccgcggtggcggggatcgtaattgctttaaccggcggctcgcgcttcagcgtgtccgggccaaccgccgctttcgtggtgatcctctacccggtctcgcagcagttcgggctcgccgggctgctggtcgccaccttgatgtcggggatcttcctgattcttttcggcctggcgcgctttggccgcctgattgagtatattccgctatcggtcaccctcggcttcacctccgggatcggtatcaccatcggtaccatgcaaattaaagattttctcggtctgcagatggcccacgtgcctgaacattatctgcagaaagtcggcgcgctggcgatggcgctgccgaccattaaccccggcgatgccgccatcggcgttgtcacgctgggcacgctgattatctggccgcgtctggggattcgtctgccgggccacctgccggccctgctggcgggctgcgcggtgatgggcgtggtcaacctgcttggcgggcacgtcgccaccatcggctctcagttccactatattctcgccgacggcagccagggcaacggtattccgcagctgctgccgcagctggtgctgccgtgggatatgcccggttcggacttcaccctcagctggtcctcgctgcaggcgctgctgccggcggcgttttccatggccatgctcggggcgattgagtccctgctgtgcgccgtggtgctggacggcatgaccggcaccaaacacaaggccaacagcgagctgattggccaggggctcggcaatatcgtcgcgccgttcttcggcggcattaccgccaccgccgctatcgcccgctcggcggccaacgttcgcgccggggcgacctcgccggtttccgccgtgatccacgcgctgctggtgatcatggcgctgctggtgcttgcccctctgctctcctggctgccgctttccgcgatggcggcgctgctgctgatggtggcatggaatatgagcgaagcgcacaaggtcgttaacctgctgcgctatgcgccaaaagacgacattatcgtcatgctgatgtgtatgtcgctgaccgtcctgtttgatatggtcatcgctattagcgtcggtattgtgctggcttccctgctgtttatgcgccggatcgcgcggatgacccgcctcgcgccggtcaacgttgaggttcccgatgacgtactggtgctgcgcgtcattggtccgctgtttttcgccgccgcggaagggttgtttaccgatctggaaacgcggattgctggcaagcgtatcgtcgtgctgaagtgggatgcggtgccggtgctggatgccggcgggctggatgccttccagcgcttcgtgaataagctgccggaaggctgtgagctacgcgtgtcgaacctggaatttcagccgctgcgtaccctggcgcgggcaggcgttaagccgattccgggccgcctgagcttctacccggaccgcagcgccgcgctggcggatatttaattacccggcggcaggccccggcgcctgccgcatcattacgccaatcgcctgctgaagccagccaagcacctccggcgtcatccacgttcccttcattaaatgcggctcccgctccatggcataacgaaacttctgctgcgtgtgcggatcctttcccgcgtaagactggaacagcgccagccagcgctgcgccagctgctgaccctccgcggaggcaggctcccgcttctcacgacaggcccgatgcagctcggccaccagcgccggccactccatcaggcgatcgaaatagtgctgccgtgtaaaagccagctcttcggcgttcagatagcgcgcccagatggccagcttgctttcggcaaaagcacgggtaatgaaatcaatcatctccggcgtcaccccggtttgttcgcgcatctgcggttcggcggcgtgcatctcattcaggcgagtgagaaactccggcctgccggcggtatcctgctccagctgcgccatccagcgggtggccagcgcaatcgcccgaggctcatcggccggacagcgttcgcccataagctgctgcgcttcacccaccagctccagccatatctggttacgctgcgcatcctgctctgcgaacggcagcacctgtaattcctgttgactaaaccagcgatcgtacattttcatcagctccagcgtttgtagccaggactccaggtcgggctcgtctccgcagtccagctcttcacgcagcagcgccaggcgctggcgcagcgtggagagggtttgcagctgccggtcgagggtggcgatctgcttgaccagcaggtcggacagcgagaaggcgtcccggtcgagatagtccttgatagtggcgagttccagcccggcctgcgccagcgctttgatcatatgcagtcgctgaacggccgccagattatagagccggtaacccgccgcgcttctggccgaaggcgtcagcagtcccgtttgttcatagtgatgtagcgtgcggacggttatgccggcgcgcttcgccagttcacccacctgaattaacatgactgctcctttcgtttaccagtggcgccactctgctgcctgacgtgacgtcagggtcaagcgttctgtacaggaattgtattaggcagacggtggcgaagaaagacgaagagagaaaggagaatttgagacaccaacaggcgggcagcctgaacgggcggcatgaaagcgcaccagccgttcacaacggctggcggtctggaattcactcagctgtggcgatgctgatcgcggcggcagcgtttatcgtagtggcgaacccaccagtatctgtcgctaacctgttcatgaccgccgatacgggcgccagccagccacagtaccgcgccgacaaagatactcaagatcgcgccgtgtgcgaaaaactgcggcaggtcaagctgcggaagctggtttagaatagaataaccaacgccgacaaccatgacgaccaaccccaaccccatcagcacattaccgagtaacgaagcgtttctgcgtttcatatgtcacctccggaaccttgggttgcatgggaatatccccaaatcttataggtgtagtatagacaatggccaatatagcgattgcgtggacgatcacagaagcgaacatcttgccaacaaaagtttacaaataacccactgaacaacatcaaattctaattattcaaacccgtgattatctgtggcgggtgcgtttcgctggcagaattttgtcaaccgcgcgcgcagacagtacactacgcgccagagaacgatccaagcaggataaaaaagtgagcataaaattaattgtcggcctggcgaaccccggcgctgaatacgcagcgacccgacataacgccggcgcctggtacgtggatttactggctgaacgccaccgcgcgccgctgcgcgaagagagcaaattcttcggctacacctcgcggattaaccttgccggcgaggatgtccgcctgctggtgccgacgacctttatgaacctgagcggcaaagccgtcggcgcgatggcgactttctttcgcatcaacccggacgaaatcctggtcgcccacgatgagctcgacttaccgccaggcgtggctaagtttaagctgggcggcggccacggcggccataatggcctgaaggacatcatcagcaagctgggcaataacccgaactttcaccgcttacgcgtgggaatcggccatccgggcgataaaaataaagttgtcggttttgtgctgggcaagccgcccgccagcgaacagaagctgattgatgaggccgttgacgaagcggcgcgctgcaccgaggtgtggctgaaggatggcctgaccaaggcgaccaaccgtttacacgcttttaaagcgcaataaccggtcggcgtgcggaatttttgtcacgcaccgtgtataataggcgaagctatttacttttctgcaatctgttcactgtaacaggttgattatccaaagattaaggtgatttaaatcatgggattcaaatgcggtatcgtcggtttgcccaacgtcggcaaatccaccctgttcaatgcgctcactaaagcgggtattgaagcggccaacttccccttctgtaccattgagccgaacaccggtgtcgtgccgatgcccgatccgcgtctggacaaactggctgaaatcgtcaaaccacagcgtattctgccaaccacgatggaattcgttgatatcgcaggcctcgttaaaggcgcgtcgaaaggtgaaggcctgggcaaccagtttctgaccaacatccgcgaaaccgaagctatcggtcacgtggtgcgctgtttcgaaaacgacaacattatccacgttaacaataaagtggacccggctgacgatattgaagtgatcaataccgaactggcgctctccgacctggatacctgcgaacgcgccatccatcgcgtgcagaagaaagccaaaggcggcgataaagacgcgaaagccgagctggcggcgctggaaaaatgcctgccgcaccttgagaatgccggtatgctgcgttcgttgaaaaatctgaccgacgaagacaaagcggcgattaaatatctgagcttcctgaccctgaagccgaccatgtatatcgccaacgtcaacgaagacggctttgagaacaacccttatctcgataaagtccgcgaaatcgccgccgccgaaggttctgtggtggtcgccgtttgcgccgccgttgagtccgatatcgccgagctggacgatgccgaccgcgatgagtttatggccgagctgggtctcgaagagccgggcctgaaccgcgttatccgcgccggctacgagctgctgaacctgcagacctacttcaccgcaggggtgaaggaagtgcgcgcctggactatccccgtcggcgccactgccccgcaggccgcgggtaaaatccacaccgactttgaaaaaggctttatccgcgcgcagaccatcgcctatgaagactttattacctataaaggcgaacagggtgccaaagaagccgggaaaatgcgcgctgaaggtaaagactacatcgtgaaagatggcgatgtgatgaacttcctgttcaacgtctaaataaaatttgttgtctcatgaggtttcattgaacctcatgaacatcgaaaaaaaccacaaaatccacgcaattgcgtggatttttcatttcagcaagcgcgtaagcaagtcgcagatggagttagcccgacacaggctcgccagttagataagatccgcaaggtcaacgacgtctccaacacctttaagctgatcgctaaagagtggttgcagatgaaagactgggccgaaattaccaaaacgcgccgactggatatgcttgaacgtgtggttttccccgcaataggtaatctcccaatcagagaggtcactccacaccacatccttagaattcttcaagaaactgctaaacgaggagcaccgacagttgccgctgaagctcgccgcaccgtttcatcagtttttgagttagcagttgcaacgcttagagctgatagcgatcctgtacggcctgttcgcaaggcccttccggccaataagacacagcacaaacaagcactgaatcctcagcaaatcggaaagttattaaactgttttgataatagtcgtggctcgtaccaggttaactattgtatgtggcttatgtggtggacattgacgcgtcctgcagaagccaccgaagcagaatggacagaattcgatcttgataacgccctgtggacaattccggcagcgcgaatgaaagcccgcagagaacacgttattcccctaccctcccaagctatcaaaatgctcagaacactacagggattaaccgggcatcggcagcaccttttcccgggcagggataatccgttaggtccaatgacatcgcactcgctgcgccagctacgtaaaagcctcggctggagtggtacatatagcccgcatgcaacccgaaccacaggaagtacccgtttaaacgagatgggctatcgacctgatgctattgaggcccaacttgcgcacgctgataccaacaatgttcgtcgcacatacaaccatgcaacttatcttgatgagcgaaaggttatgatgcaggactgggcaaataaacttgaagaatgggtaggaagcgcgcgcagcactattgatgtttcgtaaaccatgatgtattggtctgttaatgctgattattaacgataatttcccatcagattataaaaactatatttcagtctacatttttgtaactatctgattatacgaccattgtactctcctcacccagcgttataatttcttagcacccattagcgcaggatgttcccatgagccgataccgtgtctctggcagtgaaggacaatatgagaaaaactccgatgagcaagttctggcaaataagctggggattgctgattctggtgagatggacgaagcggagcttgtgctgttagagaagctctatcactgcatttttgaagagcagtttccagcagggcagatcaccgttgctttgctgaaaagctggcatcgccgctggctgggaaacatctatgagtgggccgggcaagaaaggactgtcaatatcagcaaagggggctttatgttcgcgccctctgcacagttgccaaaactaatacacgaattcgacgctaaataccttgcccgatatacaccatgcactaacatgagcgaagaacagatcatagaggctattgctgtaacccatgtagagctgatactcatccatccattccgggaaggcaatggacgtttatcacgacttttagctgatgtgatggcagttcaggggggacacaggccgctggattatcaaagctgggagcaaaacaaagccgaatatatttcggctatccacgcaggtatgtcaatggactacggcccgatgtgttattgggtcggtactgcgttaagacgtgattaaacagcaagacgaagatgggcgaactttttgcgcgtcgcttcaagcgaagcttcgatcttctcagaagactgccccgtctcaacggcggttgacgttgctaccgagcgaacaatgtcagcgcgagacggtttaacgtaatacacctgcgttttcttgtcattgctcatcgcgattcctcagctatcgaatgtgtaatctgtactcattatatcaaggtttcgacacgacttcacatcatctatagcccgacgtcatcaaggggccatctagctctgatttagcactgcactgaatttgggccagggtcagtggtaactagcctcagatagcagcatcaactaaagtgagtacagacatgagtatgaaaataaaaatcaaaaataaaaacattaaatatcaattcaataaatatcaaatcacgattcaacgtctaagcgtttcttcgccgtcatgccctccacaaaatccacgcgctcgcgtggattttttattgcccgccgttcccgtcagttctgacccgccgccagcgaatatttctttattttgcgatacagcgtggcgatgccgatgcccagctcatccgccgcctgctttttattactgtagcgagagagcgcatcgcggatcatctgccgctccatctcctccagcgccgtcacattctcctcctgagtgagggtcgctggcgctgaagccgacgacgtcgcctggctcgccgcttctccgctgcttaacagattcggcggcagcagcgacatatcgatgatttctcccgacggcaccacgttgaccaggtactccatcaggttgctgagttcgcgaatattgcccggccagcgatagcgcttaaggaaatcgatcacgtcctgcgcgacgccgggataaaccagattgagacgaccggtatgcagatgcaggaaatagtgaatcagcagttcaatgtcgtcctgacgttcgcgcagcggcggcagacgcagcggaatcacgttcagacgatagtagagatcttcgcggaacttcccttccgcgatgtactgttccaggttttgattggtcgcggatatgatacgaatatcgacctgaaccggatggctggcgcccaccggctgaatctcacgtgactcaatggcccgcagcagcttggcctgcagagtgagcggcatatcgccaatttcgtcaagaaacagcgtcccgctattggccgcctgaatcaggccggtcttaccgtttgccgatgcgccggtaaacgcccccttcacgtagccaaacagttcgctttctaacagctgctcgggtatcgcggcgcagttaatcgcgataaagggcttcgcatggcgatcgctgagcttgtggatagcgcgggcaaccacctctttcccggtcccgctttcaccggcaatcatcacgctggaggggctcggggccacgcggctgatcagctttttaagctgccgcataggtcgacactcccccaccatcgcctcaatctgcggcccttcctgcccgcagctgaaatcggccgaagagtgcgactgatggaacgccattaaaaataaccactgatcctgcaccgcgtgcagctggccgataatgagctccttgcgatcgtcaaaggagataatgtgctgcatatggccgtgcttgaaattatcttcgaaggtcaacggctgaaactggattgacttaccaatcacctgtccctgagtgacgctcattattttcaaagcggcctggttggcaaatttgactctttgatcgttgcccacgaccagtacgccctgatccatattttcgatcatggttaaaaatattttatggatattgtcgccgaccgcccgctcctgcaaaaagcgggaaacgaatatggttgagacatgacgaacataatcagaaaactcctggatattcgcatttatacgttcctgctgctcgcgcgtcagcgcaaccaggctaataacgccgacgcagcggtcgtgatacatcaccggcgtgccaagaaaggctttctcttcgcatttctccttattgttacagtctttacacagggggtcgaagcgggagtgggtaacgaccttctcggtctgtgtttcaataatgtaacgcagaagccgtgaatttgaatttaatttatagccaatctgtttactataagcgccagttccggcgacccggtataattcgttatcaacaatctcgacctccagctgcagcacgctggatagcatccttgcaaacttttgaattgtaggctgaatctgcattaaaatggagggtgctttggacggtatcatgtctatcggccttctattattgctcacctgttcggcgtcaagcgaagcggctttatttatctgcggggaatgataccactccttttagccacccgcgttgatatagatagggccaattcccccaccttatcttaaatatgcaagagctatcacagtttcttatcattatgataaatttgccgcggtttttatcatattggcgcaatgtgaagatgataatcgcattatttacggcggcaacccgcgcctgtcccgcagaaatggacggcgggggggatattttcacctttctcttcccgggataactcgcctgaattcgtgacagacctggcataatcttaactattcaatcctctccgccgcctctcccggaggatttggcacgcttattgttagtggtaatacagcgctggcagtcgctaattcggcaactctgcatatccgaccgcacagcaatcaataagccgtcattcacgaccaggattgaaacatgaaaactgttaacgaactgattaaggatatcaataaacttaactctcatctcagtgagaaagactttctgctgacctgggaacaatcgccggatgagctgaaacaggtgctggacgtcgccgccgcgctaaaaacgctacgcgctgaaaatatcgccaccaaagtgtttaacagcggattgggtatttccgtgttccgcgataactcaacccgtacccgcttctcctacgcttccgcgcttaacctgttagggctggcgcaacaggatctggatgaggggaaatcgcagattgcccacggcgaaacggtccgtgaaaccgccaacatgatctcattctgcgccgacgccatcggcattcgcgatgacatgttccttggcgcgggcaacgcctacatgcgcgaagtcggcgaagcgctggacgacggccacaagcagggcgtcctgccgcagcgaccggcgctgatcaatctgcagtgcgatatcgaccacccgacgcaatccatggccgatctcgcctggctgcgcgagcacttcggttcgctggagaatctgaaaggtaagaagatcgccatgacctgggcctactcgccgagctatggcaaacccctctcggtgccgcagggcattatcggcctgatgacccgcttcggtatggacgtcaccctcgcccacccggaagggtacgacctgatccctgacgttatcgaagtggcaaaaaacaatgcccaggcctccggcggcagcttccgccaggtgaacagcatggaggaagcctttaaagacgccgatatcgtctatccgaaatcctgggcgccgtacaaggtaatggaaaaacgcaccgagctgctgcgcacaaatgaccatgaaggtctgaaggcgctggagaaagcctgccttgagcagaacgccggccataaagactggcactgtacggaagagatgatgaagcacacccgcgacggtgaagcgctgtatatgcactgcctgccggcggatatcaccggcgtctcctgcgacgcgggcgaagtcaccgagggagtcttcgagaagtaccggatcccgacctacaaagaggccagctggaagccgtacatcatcgccgcgatgatcgtctgccgcaaatacgcgaacccgggcaaggtgctggagcagctgctcaaggaagcgcagaaacgcatcaaataatccccaggctggcctgcgggccagccccacgactttcgcatttcaaaaaggataaggatcgagtatgtctgctttctcactgaaaatggatattgccgaaaaccgtttttttaacggagagatttcaccgctgttttcacgccagcaggcgcagcaggctcgccgctttcatcaaaagatcgccggctatcagcctacgccgctggtggcgctgaacgaactttccgcgctgtttggggtacaaaaaatcctcgttaaagatgaatcccggcgctttggcctcaacgccttcaaaatgctcggcggctcttatgctatcgcccggctgctgtgtgaaaaatatcatttagatatcaacgatctctccttcgaaacgctcaaatccagcatcaaagagaagatgacgttcgccaccaccaccgacggcaaccacggccgcggcgtggcgtgggcagcccgccagttaggccagaacgccgtcatctatatgccgaaaggctcagcgcaggagcgggttgacgccatactgcgcctcggcgccgagtgtatcgtcaccgatatgaactacgacgacaccgtccgctttaccatgcagaccgcgcagaaaaacggctgggaggtggtgcaggacaccgcctgggaaggctatacgaaaattccgacctggattatgcagggctacgccaccctcgccgatgaaacggtagaacagctctcctcaatgggtatcgcccgtccgacgcacgtgcttctgcagggcggcgtgggggcgatggcgggcggcgtgctgggctacctggccgatgtctacggcgcgaagcatctccattccattatcgtcgagccggagctggccgactgtctctaccgctctgcgctgaagggccagatcgtcaacgtcagcggcgatatggccaccattatggccggtctcgcctgcggtgagcccaacccgctgggctgggaagtgctgcgcaactgcgccacgcagttcgtctcctgtcaggacgccgtcgccgccctcggcatgcgggtgctgggaaacccggcgggccaggatccgcgcgttatttccggcgaatccggcgccgtcggtctcggcctgctggcggcgattcatttccatccgcagcgcgaagcgctgatgcacaagctcaagctggatagcgattccgtggtgctggtgattagcaccgaaggcgacaccgacgttaagcactatcgcgaagtcgtctgggaaggcaaacatccggccgcgcagtagccgattgatcaacattcctcccgcccggcgggacccccgtattcagaactggagaacatccttatggctaagcaaattccgttcaacgcgatcctggaaaaatcaaaacaatacgaaaaagagatgacccgcttcctgcgcgatatgatcgccatccccagcgaaagcagcgatgagaagcgcgtggtgcaccgtatcaaagaggagatggagaaagtcgggttcgacaaagtggaaatcgatccgatgggtaacgtgctgggctacatcggtcacggcccgcgtctggtcgccatggacgcgcacattgataccgtcggcattggcaacatcaagaactggaacttcgacccgtacgaaggtatggagaccgatgagctgatcggcggacgcggcgcgtctgaccaggagggcggaatggcctccatggtttacgccggtaaaatcattaaagatctgggcctggaagatgagtataccctgctggtgaccggtaccgttcaggaagaggattgcgacggcctgtgctggcagtacattattgaacaatccggcatacgtccggaattcgtggtcagcaccgaacctaccgactgccagatttaccgcggccagcgcgggcgtatggagatccgcgtggaggttcagggcgtcagctgccacggctccgccccggagcgcggcgataacgccatcttcaaaatggcgcccgttctcaccgagctggaacagctttcgcacaagctgggcgatgacgaattcctcggcaaaggcaccctgaccgtttccgagattttcttcacctcgccgagccgctgcgcggtagcggatagctgcgccgtctccattgaccgccgtctgacctggggcgaaacctgggaaggcgcgctggaagagatccgcgcgctgccggcggtgaaaaaagccgccgcggtggtctcgatgtacaactacgaacgcccctcctggaccggcctggtctacccgaccgaatgctacttcccgacctggaaagtggaagagaaccacttcaccgttcgcgccctgagcaacgcctatgaaggtctgttcggcaaagcgccggtggtggataagtggaccttctccaccaacggcgtctccattatgggccgccacggcattccggttatcggctttgggcctgggaaagagccggaggcgcatgcgccgaatgagaaaacctggaaatcgcatctggtaacctgcgccgcgatgtatgccgctatcccgctgagctggctggccacggagtaattgttcgtcctgtctgccgccgcgctctgcggcggtatgttgaggtttctatgcgcgtactgattaaaaatggcctcgtcgtcaacgccgacggacagctaaagcaggacctgctcattgaagatggcctcgtcaagcgccttgccagttctattgaggcagaacaaccctgcgaagtgattgacgccgagggctgctacgtgatgcccggcggcgtcgacgttcatacgcatttcaatattgatgtgggtctcgcccgcagctgcgatgatttctttaccggcacccgggccgcggcctgcggcggtaccaccactattgttgatcatatgggcttcgggcccgtcggctgccacctgcgccaccagttcgaggtctatcgcggctacgccgcctataaagccgttatcgactacagttttcacggcgttatccagcacgttaaccacggcattctcgacgagatcccgatgatggtggatagcggcatcagcagctttaagctctatctgacctaccagtacaaactcagcgatgatgagatattgcaggcgatgcgccacctgcagcgcgccggcgcgctgacgacggtgcatccggaaaacgatgccgccatcgcccagcgccgggcggaatttatcaacgccggtaaaaccgcgccgcgctatcacgccctgagccgcccgctggagtgcgaggcggaagccatcgcccgaacgatcaacctcgcgcagctggcgggaaacgcgccgctgtatatcgtgcatctttccaacgccctgggcctagagtacctgcgcctcgccagaagacgccaccagccggtgtgggtggagacctgtccgcagtatctgctgctcgacgagcgctgctacgagcgcgaagacgcgcttaactatctgctcagccctcccctgcgcaacgccagcaacaacgatgcgctatggcgcggtatccatgatggagatattgacacggtcgccaccgaccactgcgcgttctctgcgcagcagcgcaggcagatctccggcggcgactttagccgctgcccgaacggcctgccgggggtggaaaaccgcctgctgctgctgttttcgcacggcgtgatgaccgggcgcatcacccctgagcgctttgtggcgctcaccagcgccaacccggcgaagctgtttggcctgtggccgcagaaggggctgctggcgcccggcgccgatggcgacgtggttatcatcgatccgcagcgtaccaccaccatccgtcatgccatgctgcacgacaacgccgactattcaccctatgaaggctttatctgtcagggcgcgattcgccagacgctctcccacggcagagtgatctttgataacggcacctttaccggcatcgccggacagggccgctttttacgccgacaacccttttccaccgctcaccaggccgtcagcggaacagaaacgtaatgagaggaagctatgagtaaaaaaattgttctcgctctcggcgggaatgcgctgggcgacgatctcgccggacagatgcaggccgtacgacacaccgcacggacgatcgtcgatcttatcgcccttggccaccaggtggtggtcactcacggcaacggtccgcaggtgggcatgatcaaccaggccttcgaggccgcggcaaaaaccgaggcccatacgcccatgctgccgatgtcggtctgcgtggccctgagccagggctacatcggctacgacctgcagaacgcgattcgtgaagaactgctaacgcgccagctggatatcccggtggcgaccttgataacccaggtggaagtggacgctaacgataaggcatttcttaatccgaccaagcccatcggctcgttcttcagcaaagaagaggccgaaaagctgagccaaaacggctacatcatgaaagaggacgccgggcgcggctaccgtcgcgtcgtcgcgtcgcccatgccggtagatattatcgagaaacaaacggtaaaagcgctgatggatgactgccacgtggtgatcaccgtcggcggcggcggcattccggtgattcgcgagggtaaccatctgcgcggcgccagcgcggttatcgataaggactgggccagcgcgaagctggcggagatgatcgacgccgacctgctgatcattctcaccgccgtagaaaaggtggcgatcaacttcggtaaacctgacgagcagtggctggataacctctccctgcgcgatgccgaacgctttatcgaagaggggcactttgccaaaggctcaatgctgccaaaagtggaagccgccgccgccttcgcccgctcagggccggggcgtaaagcgctgatcacgatgctgagcaaagccaaagaggggattgaaggaaaaacgggcaccattattagccaataagctgtacgccacgggttgccgggaacctcccggcaacatttctcctcgcagaagctcagacctccaccgcctcagccagacaatccggctggcacgcttgcctcacctggttcatcagcccccccggcgcgccgtttttcacctgcaggatctccgccagcacgctgatggcaatctcgtttggcgtctcggcgccgatgtcatagccaatcggcgcccgcagacggctgatatccgcctccgttacgccgttttcccgcatctggcggacaaaggcctgcactttccgccggctggccagcagccccagccacgccaccggctgggttatcagcctgtccagcgcctcccgatcctggttgttggtggcaatcagcacgaaatcctgcggccggaccgccatcgcctccactacgtccgtaaagctggcagcgtgcaccagccgcgccgaaagcggaaaagcgtcggggcaaaggctggcggaatagatatcgccgacgcagatgtcaaaatccacccgcgccgcggcgtgggcaaccgcgcggttgacgtgcccggcgccgaccagcagcaggcgcgggcgcaggccgtgcacgctgatgtaaaccgacatcgcgccgccgcagtcggagcccacggcgtcgctgccggtgcgcgccatgcggccgtgaaacattcgcgacgcccgttcgcgcagcgcttccagcgccgcatcgatgactttacgctccaccattccgccgccaatggtgcccacaatcgaaccgtcctcccggataagcatctgagcggagtgtcggggggtggagccccgactttcgacaatctgcgccagggcaaaggggcgattctgctcctcaagtcgtgctgcttctgcaaaaatattcataccaacctcaaaggcgatgtttacggctctatttgtttacctgcgatatttcccgggttctcagtttgagagtttacccggcgttgaaatagcgtcgcagcgacccgtatcgactatgcaatatttatacttagccgccgtttttcatcgcaaattgtgagacaggtcatttcgttagccgtaatgacgctgcaaccgggatcctacgccgaatatttcctctgtcgccgcggtaaaagaaagccgcccgctgaaatcaccgccgaacggtcggcataaattatcattctgatattcaggatctgattttgagaaatctcgccgaatgataaagcgtattgatttgagttctcatttccccgctgtggaattattcacgcattcgcgtcgagtttcgacctggttcacaaattaattattctaccgccgcggtttgaataactggtgtgattgttgctcctctttcgttatccgtcgggatgattaccaccggcaatgtcgatcttacaatgatatctaaggagagggttatgggagatataatgcgtcccgtgccgtttgaggagcttttaacgcgcattttcgacgagtaccagagtcagcggactatttttggcatccccgagcaacagttttatacgccgcaggcgcagcggtcgatcggcgtattcggcgaaagctgcgcgacgccgctcggcccggcagccgggccgcatacccagctggcgcagaacattattaccgcctggctaaccggcgggcggtttatcgagctgaaaaccgtacagatccttgaccgcctggagctggaaaagccctgcatcgatgccgaagatgagtgcttcaacaccgagtggtccaccgaatttaccctcaaaaaagcctgggatgagtacctgaaagcctggttcacgctgcatctgctggagcaggtctttccgctgggcaccgataaagagagcaagtcgtttattttcaatatgagcgtcggctacaaccttgacggtattaagcagccgccaatgcaggaatttatcgacaacatgatggacgcctccgcccatcctaaattcgcccagtaccgcgacaccctgaaccgctggctgcaaaatagaacctttatcgacagcctgccaacctgcgcgcgcaaagacgggctggacaatctggctcaacgcgtgccggccaggctggttcagggcgtcaccctctcaaccatgcacggctgcccgccggacgagatcgaagccatctgccgctatatgctgacggagaaaaatctcaatacctttgtgaagctcaacccgaccctgctcggctatccgcgcgttcgccagatcctcgacgcctgcggcttcggctatatcggccttagcgaagcgtcgtttgaccacgaccttaagatcgaccgggcgctggagatgctgacgcgcctgatggcgctggcgaaagcgcgcagcctcggctttggcgtcaagctgaccaacaccctcggcaccgtcaacaacaagggagcgctgccgggagatgaaatgtatatgtccggccgcgcgctattcccgctatcgatcaacgtagccgccctgctctcgcgggcgtttgacggcaagctgccgatctcctactccggcggcgccagccagctcaacatccgcgagattttcgacaccggcattcgccctatcaccatggccaccgacctgctgaagccgggaggatatctgcgcctgagcgagtgcatgcgcgagctggagaaagccgacggctggaacatgacgcagatcgacgtcgagcgcctcaacgcactggcggaaaaagcggtgagcatggactacacccagaaacagtggaagccggaagagcgcattgataccggcgagccgctgccgctgctggactgctacgtcgccccctgcgtgacggcctgcgccatcaagcaggatattccggagtatatccgcctgctgggcgagcatcgctacgccgacgcgctggagctgatctatcagcgcaacgcgttgccggccatcaccggtcatatctgcgaccaccagtgccagtacaactgtacgcgtctggattacgacagcgcgctcaacatccgtgagctgaaaaaagtggcgctggagaaaggctgggacgagtaccgcagccgctggcataagcccgcgggatccggctcccggcacccggtagcggtgatcggcgcaggccctgccggtctcgccgccggatacttcctcgcccgcgccgggcatccggtcacggtttttgaacgcgaagccagcgccgggggcgtggtgaagaatatcattccgcagttccgcattcccggcgagcttatccagcacgatatcgattttgtcgtcgcccacggcgtcaaaattgagtacggctgcgatccgcatctgagcgtggaaaaactgcaggcgaagggttttcgttacgtgctggtcggcaccggtaccgataaaaacagcggcgtgaagctgggcggcgataaccagaacgtgcataagtcgctgcagttcctgcgcgagtttaaccgcggcgccgagctgaacctgggcaaacgcgtggccgtggtcggcgccggcaacaccgccatggactgcgcccgcgcggcgctgcgcgtacccggcgtgcagagcgcgaccatcgtctatcgccgctcgcagcaagagatgcccgcctggcgcgaagagtacgatgaggcgctgctcgacggcgtcgacttcgagtggctatgcaacccggaacagtttaacgccgacgggacgctcgtcgtacgcgtcatgaagctcggcgagccggatgagaaaggccgccgccgcccggtggagaccgatgagattcgcaccctgcaagtcgactctctgattaccgccatcggcgagcagcaggacggcgaagcgctgtcggcaatggggatcccgctcgacccgcagggctggccggtggtcaacgccgatggcgagaccagcaaaccgaacgttttcctgatcggcgacgttcagcgcggcccctcttctatcgtctccgctatcggcaacgcgcgacgggccacggacgcgatcctggcccgggaaaatatcgccagcagctacggaaacaaagtctggaacaacgtcgatccggcgaaggtgtaccagcgtaaaggcgccatcgccgtcacgctggtggataaaaaccagcgcgaggcttttgtcgagcaggaagccagccgctgcctggagtgcaactacgtgtgcagcaagtgcgtcgacgtctgtccgaaccgcgccaatatttccgtggccgtgccgggcttccagaatcgcttccagaccctgcatctggacgcttattgcaacgaatgcggcaactgcgctcagttctgcccgtggcagggaaaaccgtataaagacaaaatcaccgtgttcagcctggagcaggattttgtcaacagcaccaatccgggcttcttcgtcgcgggcgccagcgtcaaagtgcgtcaggacgaccagacgtggcagctggaaattaacgaccgcggccagtttaacgaggtaccggcccagctggacgccatgtgccgcatcataagccatattcatcagcaccaaagctatcttctcggaggcgttgaagtatgagtatcctgatcctgaaaaatgccaccgccgcgcagatctatccggcgaaagtgtgggagaacgtcgatatcgccattgagagcgataaaattctcgccgtcggccccggcctgtgccagcgctatccacaggcgcaggtgaaagagatgcgcgggcagctggtgatgcccggcatggtctgctcccacaatcacttttattccggcctgtcccgggggattcaggccaatatcgcccccagcccggactttatctccacgctgaaaaacctgtggtggcgccttgaccgggcgctggacgaagagtcgctctactacagcgggctgatctgcgccatggaggccgtgcgcagcggctgcacggcggttgtcgatcatcatgcgtcgccccactatatcgcgggctccctgagccagctgcgcaacgccttcctcaaaatcgggctgcgcgggatgacctgcttcgaaaccaccgaccgcaactttggcagccgcgagctgcgcgacagcgttgaggagaacattcgcttcgccagagagatcgacgccgcgcgcgaaaagggcgaccagccttatctggtcgaggcccatatcggcgcccatgcgccgttcaccgtgccggatgaaggtctggcgatgctgcgtgaagcgctaaaagccaccggccgcggcctgcatatccacgcggcggaagaccgctacgatgtctctcacagccatcacctttacggcaaagacctgctggtgcggctggcggagttcgaccttatcaacagtaagacgctgattgcccacggcctgtacatctccgatgccgacgtcgagctgctcaacgcgcaggacggcttcctggtgcacaacgcccgctccaacatgaacaaccacgtcggctacaacccccgcctgccgcagatgcgcaatctggcgctcggcaccgacggcatcggttccgacatgttcgaggagatgaagtttgccttctttaaacaccgcgacgccggcgggccgctgtggccggacagcttcgcgaaggcgctgagcaacggcaatgaactgttgaatcgcaacttcaacgcccgctttggccgccttgaggcgggctataaagcggacctcaccatttgcgactatatggcgccgacgccgcttatcgcggaaaacatcgccggacatatcgccttcggtctgggggcaaacagcgtgcgcagcgtcatggtgaacggcgtgatgatctacgaggatcgccagttcagcttcgactgcgagccgatattccgcgaagcgcagaaagtggcgaaaaaaatgtgggcgcgaatggatgcgctccccgcgtagcccgcgtaaaaacgctaaaccggcctggcaggccggttttttttgctgacagaacgcgggcgtatgaaattgcccggcagcttccgcgccgccgggcgcgaggtttacagcgacagcagcgcggcggtggcgatattgcgctgcttttgcagcgcgctgagctgctcttcggtcatgatactcagcgccgccgtcgggcagacatcaacgcaggcggggccgcgctcccgggtgccgcaaagatcgcacttaacgataaccggcgtcacaccggcctccacctcaatggtaatcgccccaaacgggcaggcgaccacgcagctctggcagccaatgcagcgcccgccgtcggcctccactttctccgcccccatgctcagcgccccggtcgggcaggcgcccacgcagggcgcattctcgcactgatgacacatcaccggcacgctaagctcgtcgaggcgcatcaccttcaggcggggatgaaactccgcccccggcgccacgtgttccagcgcacaggctacctcacaggtcctgcagccgatgcaggcctgcgaactggcaacgataaaacgagtcatatctcctcccgggccgtgaattgcatcaacatctcgctggccgcctgccgcccggcgaccatggcggtaaccaccaggtccgcgccggtcacggcatcgccgccggcaaagattttgtcatggctggtttgcgtcgttccgcgccctttgccgccggtcactatctgcccccagcggtccagctttatcccgtggccgcgcagccacggcatctcgtgagcctgaaagccaaacgccataatgagcacatcggctttaagttcaaacccggaatccgggatcggctgcggccggcggcggccgtccgggcccggctcgcccatcttcgtgcggatcatctccaccgcgcagacctgccccttgcggttgagctgaatgcgctgcggctgcacgttaaactcaaatttcaccccctcttcccgcgcgttcaccacctcttttttcgatccgggcatgctcagctcatcgcgacggtaggcgcaggtcacgctcgctgcgccgcggcgaacggcggtgcgcaggcagtccatcgccgtatctcccccgccaagcaccaccacccgtttccccttaatgtcggtcaggggatactcggggctctcttcgagccccatcacctcgcgggtgctggcaatcaggaacggcagggcctgaatcacgccgggggcgttctctccctccaggccggcggccatcagaccgtaggtgcccacgccaaggaagacggcgtcatagtttttcaccagatcggcaaaagccacgtcgcgccccacctcctggttgagatgaaaattgacgcccatggcgctaaaaatgtcgcgtcgcttctcaagcacgtttttatccagcttgaacggcggaataccgaaggtcagcaggccgccgatttccggatggcgatcgaacacgtcaacgtgcacgcccgcgcgcacgagaatatcggcgcagcccagtccggcgggcccggcgccaatcaccgccacccgctccgggcgcggggctactttgccgattgtcggtcgccagcccatcgccagcgcggtatcggtgatatagcgctcaaggttgccaatggcgaccgagccgccttcgttctttaaggtgcaggccccttcgcacagcctgtcctgcggacagacgcggccgcaaatctccggcagggaactgctctgatggcacagctccgccgcctcgataatcttgccctcgctcaccaggcggatgaaatcgggaatatgattatgtaaaggacaggtccagttgcaccacgctttctgcgcgcagtagagacagcgttcgctctcatactccgcatcgcactcgctcagcggctgatagatttcgccgaagtgctgcatgcggtcatcggcgggcacttttttcgcgcccacccgcggaggtttattgagtatcgcgctgcgtctggcgccgcgaacggcgcccagcggggtttccagcgcggagcgaatctgccgcgcgctacgcagccggttaacggcggcctcatccatcagttgcagcgcctgggttggacagctggccacgcacgcctgctgaccggaaggatgctggctgcaaagatcgcatttctgcgccagctgcggcgcgtcgtcatcgttggccaccatctcaatggctccaaagggacaggcgatgacgcagtttttacagccgatgcacagcgcctctgtaaactgaacgctgtcgttcgccacgcgcagcgcctgggtcggacaggcgccgacgcagggcgcgtcgttgcagtggcggcaggtcgtcgcgctgctggcgtggcggtggaagaacacccgaatgcgcggcagaaagtcgctgcgctgccggggccagctgtcctggcgatgagaggtgacgcaggccacttcacaggcgtggcagccaatacagtttgcagaatcggcaacaataaatttattcatttgcttccctttattattccaggactcaccgggaagcaatgcaataatcaggcgcttttgttcagggtattcatatggtgcttatttttgcgagccgtctcaaaaaaaacaggcccactcccgctaagcggcgcgatatatatccgctctcgctgaacaaaaattattctccgcgctcagggtttaatcatgttgataattcaacgtatcgcgcgtgataccaaaatgagacgctccctgtctcaatgtgatagcgcgcgtttattcaccacgagatttatttgagaagtttcgcagcgcgtcgatattcccgcctttttctcgtgagttatttcacacaattctccttcaatcctccaggcgcttatttttggcacagcttacgcatattacttctcgtgcgcgcaacacgctgatgaacgcatcggctcagggaggcagcggccttcgaatcgtaacttcggctctgttcatgtttatacagagtgaagtcgtacaggagataacaacttcatgaaagatatcgccaattccgcctcacataacgggaactcgaccgcaccggtcgatgaaatattacccgttacgcaaatgattctttatgggctacagcacgtgctggtgatgtacgcgggcgccgtggcggttccgctcgttgtgggtaatgcggtagggctcccgccggagcacattattttactgatcagcgccgacctgtttatctgcggcgcggccaccatcgtgcagtcgctgggggtcggtaagtggctcggctgtcggctgccgcttatccagggctgtaccttcgccgcgctgatcccgatggtgttgatcggtaaggagtacgggatcggcggtatttccggggcggtgatcgtgtccggtatttttatcctctgctgcgcgccgtggattagcaagctcatccgcttctttcccaaggtggtgatgggcagcatcgtcacgcttatcggcatgtctattatgccggtggcaggcgggtggattggcggcgggagcagcgaaatgagcggctttggcgcccccttctcgctgctgatggcggcaatcacgctggtgattattctcaatatttacacctttgcctccggcgtcgtgaaaaacacgtcggtgctgatcggtcttatcatcggcaccgtactctggagctgctttaagcctctcgactttagcctcgtccacgccacaccctggctccatctgccgaccctgatgcccttcgccaaacctgaatttcatattatccccgtcgccctgctgtcgatggtgatggtggtggtgatggtggaaaccatgtcctcgatgatggccaccggggatattgtcgggaaaaaggtggacgcgaagatgctgcgcaacggcctcaacacctgcggtatcgcgaccactatctgcggcttcttcaatctgtttccctacgccgccttcgcgcagaacgtcggcctgatcggtttaaccggggtgcgcagccgttttgtggtgtcggtctccggcatcattctgattctgatgggtgtgttctcgaggatggcggcgctggtggtgctgataccgaaaccgatcctcggcggcgcgggcattgtcatgttcggtatggtggcggtgtccggtattcgtaccctgggacaggtcaactaccgcaacaataataacggtatggtggtggcattaacgctcggcctcggcatgatgccggtgctggtgcccaatctgtttacccagtttccgccgatggttcagctgtttctgcacagcgggattacgattggcaccctgacggctatcgtcgccaacctcaccctcaacggcagcgtgccattccgcgttaaccacgaaacgccggtccccgatccggccccgccaagctcggcggcgcgcaacatggccgtcagaaccgtcagaatgtggctcctgctgcgcaaagttcagaaggagagacagcctgaagaagcgcaggaggggtaatgatgctcaccagactcctgtttgccttgatcaccctgctgctgctggcgatacccatcgtgcagcagggtatcgcgcagggcctgaacggccgttttagctatgccctgctgttctaagtttaaggaccactgctatgaaaaaagtcacgaccgtctgcccctactgcgcctccggctgcaaaatgcagctcacggtagaagagggaaaaattacccgcgccgacgctgcgatggggaaaaataatcagggcaccctgtgcctgaagggctactacggctgggattttattgacgacccgcagatcctcaccccgcgcctgaaaaccccgatgatccgccgccggcgcggcggtaagctggagtccgtctcctgggaggaagcgctcgattacgtggcaaaccgcctcagcgacataaaagcgaagtacgggccggatgcgattcagaccaccggatcttcgcgcgccaccggcaatgaaaccaactacatcatgcaaaaatttgcgcgcgccgttattggtaccaataacgtcgactgctgcgcacgcgtctgacacggcccttcggttgcaggtctgcaccagtcggtcggcaacggcgcgatgagtaatgccatcaccgagatcgataataccgatctggtgtttattttcggctataacccggcggattcgcacccgatcgtggcgaatcacatcctcaatgccaaacgcaacggggccaaaatcatcgtctgcgatccgcgtaaaatcgaaaccgcgcgcatcgccgacctgcatctggcgctgaaaaacggctccaacattgcgctgctcaacgccatcgggcaggtgattatcgaagaagatctctacgataaatccttcgtcgccgggcgttccgaaggcttcgaagcgtatcgcaacatcgtcgaaggctatacgccggagtcggtggaagccatcaccggcatcagcgccaggcagattcgcgaatgcgcgcggctgtacgccagcgccggaaacgccatgattctgtgggggatgggcgtaacccagttctggcagggcgtcgaaacggtgcgttccctgaccagcctggcgatcctcaccggcaacctggggaaaccgcacgtcggcgtcaatccggtgcgcggccagaacaacgtccagggcgcctgcgatatgggcgcgctgccggacacctatcccggctatcagtacgtgaaattcccggaaaaccgggagaagttcgccaacgcctggggcgttgagagcctgccggagaaccctggctaccgcatcagcgagctgccgcaccgcgtggcgcacggcgaagtgcgggcggcttacattatgggggaagatccgctccagaccgacgccgagctttccgccgtacgtcaggccttcgaagagatggagctggttatcgtccaggatatctttatgaccaaaaccgccgcggcggccgatgtgattctgccctcgacctcgtggggcgagcatgagggcgtctataccgcagcggatcgcggcttccagcgctttttcaaggcggtggagccgaagtgggatctgaagaccgactggcaaatcatctgcgaaatcgccacccggatggggtatccaatgaagtacgacaacacgcagcagatctgggatgaactccgccatctgtgccccaacttcttcggcgcgacctacgagaagatgggagaactgggctacgtgcagtggccgtgccgcgacgagtcggaggcggaccagggcacttcgtatctgtttgcggaacggttctccacgccgaacgggctggcgcagttcttcacctgcgaatggcaggcgccggtcgataagctgagcgatgcctatccgctggtgctctccacggtgcgcgaggtgggccactactcctgccgttcgatgaccggcaactgcgctgcgctggccaaactggcggacgaaccgggctacatccagatcaacaccgccgacgccaaacggctcggcattgaggacgaagagctggtgtgggttaactcgcgcaaaggcaaggtgatctcccgggcgaaaatcagcgacaggccgaataaaggggcggtctacatgacctatcagtggtggattggcgcctgcaacgagctggtcaccgagaatctcagcccgataaccaaaaccccggagtacaagtactgcgccgttaacgttgagcgtattgccgatcagcgagccgccgaacggtacgtcagtgaggaatacagccagttgaaagcccgtctgcgcgaaagcgccgcggggtaaaaaatatcgccccggcgctgtgcgctccggggcgatattgtcttttcttcttccctccgccagcgctaaccgacggcggccagatctttgcggcagcggcgcgcgacctcaagatactgctgcggagtgtcaacatcccagtgaatcccctgattcgccacggggataacgcgcgccgccatctgaccgataacgtcccgcagggtggccccttgcggcgcgcgacgaatcagagaaatcgcccgctggggcagaagaaccggatggcctttaccgcgatcgtaggccggtataatgcagctcccggcgtcggcgttggcccacagccggcggtagacgcccggcgtgacctccggcatatcgcccagcgccagaaagaaacgcgaagcgcgaatatggcctaccccgcactgaatagaagagaacataccgtcctgatattgcgggttaaagaccacctcaacgcccggatgatcccgatagcacgcggccagttcgtcgccgcgaaaccccgtcaccagcaccacccgatcgcagaacgccagggcgctggcaagggcgctatcgagaatcgttccctcgccccacggcatcatcattttccatttgcccatccggctggagagcccggcggccagcataacgcactgtttatccttttttttgctcatcgtcatcctccccctgaagccgaatacaacgccgccgtcggctggcgacggcggcgcttgcggcgatcaggatttcagcaccgctttaatcgaggtaatgatcggctgatatcccgtacagcggcagatattcccctccagcgcctctttcagctcatcgtcgctgggggccgggttggcatccagcagcgccttggcgctcatcaacacgccgggcgtgcagaagccgcactgaacgccgccgtgacgaataaaggcgttctgcaattttttaccgaccggatcgtgatgcagcgcttcgacggtagtgacctccgccccgttgcactgggcggccagcagcaggcaggagcagacggatttgccgtccataatcacggtgcaggctccgcactcgcccaccgagcagccctctttggtgccggtgagcttcagctcctcgcgcagaaaatcgatcaggcggacattgtctttcacatcgcgggcaatgcggatgccattcacttttagctcaatatggttcatgttcatggctccttattttttctgctctgtcataacttcctgcagcatctgccggaacatatcgataaatacggggactttataaggcgcagaccagcgtccgccgatggctttttctaccttgtcgtgcagtaccccggccgcatagtcaatggcggcggcgtctaacgccttcccggtgagcgcctgctcaacctcagtcaaccgctgcggtttggccatcagcgcgccatccaccagacggcacaggcgaaccacgcccttatcgaccataaactgcccggttaagctctggcgcgtaatgttcaacgcattgcgccggccaagctgcagatagcgattgatcagcggctgctgcgtcggcgccggcaggataaagcggacaaccagctcatcgggctcaagaagggtgcgatagccgcccacgacaaattcgctgaccggcatccggcgcgttccgcgcgcgctgcgcagctctacttccgcatcgtagataatgagcggcggcatggagtccgcgcacggggcggcgttgacgatattgccgccgatcgttgcccggttgcgcagctgcagggagccgacggttttacaggccgtaaccagtagcggatagcgctgctgaatcaacggatgcttaaccaggtcggtaaagcagacgccggagccaatggagatcccgccctcaacgtcaaaaatctctttcagctccgccagtccggcaatgttgacaagcggcacctcgccggacagcatccgggcctgcaccagcacatcggtgccgccggcaataggcattgcccccttcccgtccatcagcgtcagggcctctttcagggtttgcgggacgctcagcgacagggtgttgaggcggtgaacctgtttcttatcgccagactccagcatctgctcgctctggcgctccggcttcttgaggttataacccaggcgaacctgctcgagggtcagcggcagggtccggttggggcggtcgatggcgaagctcaccgcgttattgagagccgcagcgcccagttcaagtaccggttcgccgataactttcgcccccatcgggcccgctttatcgtagttttccaccgcaatgatatcgatgtgcggcatatccttgatggtcggcagcagataggtatcgaagttttccgatttcaccacgccgtgctcggtgttgaaatcctcgagcatgccgtagccgatcatcccctgcagcacgccgccgtagacctggccgctaaaaccaaccgggttaatgactttaccgacatcgtgggtggcgacgacgttattgacggtgattttgccggtgcgcatatccaccgccacgtcggccagctggcagccgtacacccaggtgaaataggggctgccgcagcccttctcttcatcccagtgaatattcggcgccacgtgccagccgtaggcggagaggtttgccccggtagcccgggtcatatcgcacacctgctggaagctgaggctcagctccgggctgtggcggttgaacaccttgccattttgccaggcgatatcgtcgatgctctgcgctttcagcgtttccctgacggcgtccgccatgcgttgtttaattttgttcgccgcgctcagaatcgcctgtccgcccatcagggtaccgcgcgaagcgaccgttgagccgccgtcggcgatcatcgcggtggccggttcgctaaacatcacccggtcgagcccaataccaaaggcttccgccgccagcagcgacatggtggtctgcagcccctgcccgttctcggataccgaggtggagatgttcacgctggcgtcggcattcacctgaatcagcgccgaggacgcatccagcccctcggcccccagagagcagccgcgatggctcagcgcgaagccaatcccgtagcggatcgggccgccttccgcgttaagctttttgtagtgctcgcgtttggcctcgtattcggccttgagcagcgtcttctccagcacctcccgcgcggagacggtatgctcgctgaagacctgcccggccatgctggtatcgccctgcttgagaatattgcgcaggcggaactcaacgggcgacaggcccagttcgcccgccacgtcatccatcagcgattcgttggcgaaaatgacctgcggcgcgccgtagccgcggtaggccgaggtatagttgttgttggtgtaaacgcccaccagatcgacgcgtacgttagggatgttgtaggggcccgccgcctgcacggaactgcgccaggtgacaaacaccgtctggccgcagtagctgccgccatcggcgataatgtcgattttaatcgcctgaatgcgcgcgtcgtcgtccacgccaatgcggtatttcatcttataaggatggcgcttgtagctctcgcgcatcgactgttcgcggttataagagatcttaaccggccgcccggtcaggtgcaccagcagcgccgcgcggcaggagacgttatcgataatgtcatctttaccgccgaaggagccgccgaggacggagcgcttaatgttgaccttcgcctggggcaggtcgagatatttggcaatcaccgcccgggtgcggtgagcgttctgaatcgacccttcgatggtcatgatctgttcattattgtccaggtaggcggtaatcgattccggctcaatatagccgtgctcctggaaccccacctcatactcacgttcgaagatatggctggaggcggcaaaaccggcatcaatatcgcccttcgccgtgtggtggcgattgatgatattgctatcgagttcgctgtgaataaggcgcgccccgggcttcatcgcctcttccggggaggtaatcggctcccacggggtgtaggtgattttgattttatcgacggcgatgcaggctgcctcgtaggtttccgccgccactacggcaaccacgtcgccgcggtaggcgatctccttgtcgataatcggcggatgatcgggaacaatcgctcccagcttgcgctgaccggggatatcgttccaggtggcaatacgcacgacgccgggcactttttccgcctccgacaggtcgagcgcatcgatgcgcccggcaggaatatccacgtagcgacaaacgccatacagcatattgttcataataatgtcatcgccgtagaccgctttacccgtcaccttggcgagcccgtctacgcggggcacctcactgccaactagcaatgtatccatatttttcagtctccactcacaaagaaagataacggattaaagcaatggctatgccacctataaataaagggttatttgaggctgagttatgtgaggcgtatctaaaaatagcggccggttaaagaataaaaagcgcatgaggtcgccgctgattatcaaaacgagagcatgcgtatcactatgataattggcggttctcaattgtgtttccagggtgacgccagcggtgcatccgcagctcctgccgccgccgggcattgagcgcaaccgtcaccctgcggcaaaacgcgtatcgaggtgatgaagctttttgacgccccccgatttcgaataaaaaataaaacagacgcaataatgaaatttaaatttcataaatgaacatgttaacaaatgtgatatatatcataattttaacaattcattttcctgccaccgggccacccccccgtaaacaatcctaaaaattgccatatatatcaattaattataaaaatagccattctatacacaaggctgttacacatgacccacaaaaccaaaccgaaataaaactttcaaaatgtgatctgtttgtatttttatttcacttatagcggtaataatcatctctcactaaacgcactctgcccgccttgatggcgcagcagaaatcctaaccccccggaggatgcaatgaaggaagtgagatcaggacttatccgaaccgtttatattggcccgccccttttccaccctcacgctaccggggactttctgaacgtcaaccaccccggaggccccagccccgcatctaccgatgattcatcattaatcaaaaagaaacctctttgatcggttttatttagcgcatagcaatcgcgctaaatagttgcactaagaacaaaaaaacatttcatcccggccgtgcttcgccaggcgcaaaggcatgccgtgacggggatgggatgacacgtttttatctcgtgccgttaatcaaaacaaaaggtataaaaatgtctcttattatgaatctgaacctacagcagagaaaacgattacaccagataaccctggttgcgacatttggcggcctgctattcggttatgacaccggcgttattaatggcgcattttcctctctgaaacaatatatggccctgaccccgactaccgaaggtctggtcatgagcgtattgctgatcggcgccgcgttaggtagcgtattcgggggaaaattcgcggacttctttggcagaagaaagtacctgctctttttatccttcatctttttcatcggcgcattaatgtccgctctggcgccggatatcaccgtactgcttatttcacgtttcatcctcggctatgccgtgggtggcgcctcggtgaccgcccccacctttatttccgaagtggcgccaaccgaaatgcgcggtaaactgaccggcttaaacgaagtcgccattgttatcgggcagctcgccgcatttgccatcaacgccattattggcatcctctggggccatctccccgacgtctggcgctatatgctgatggtgcagaccattcccgccatctgcctgtttatcggtatgctgcgatcgccggaaagcccgcgctggctgatcagtaaaaaccgtcatgaagaagcgctggaaatattaaagcaaatccgccctctggaacgcgcaaccaaagaattcaacgatatcaccaccttaattaaggccgaagcggacaaaaagcttcatgcgcagaacgcctttgtcaccattctccagacgccatggattttcaaactcctgctggtgggcgtcatttgggcggcgctgcagcagaccaccggggtcaacgtcattatgtactacggtactgagatcctcagcagcgccggattctcagaaagaacctccctcatctgcaacgtactcaatggcgtgttctccgtcggcggcatgctatttggcgtgctgtacctcgtcgatcgttttaaacgtaaaaccatcattatttatggtttcgcgatcatggctaccctgcaccttatcattgccggcgtagactacacgctggtcggcgacatcaaagccacggccatctggctgctcggcgcgatgttcgttggcgttatgcagggaacgatgggctttatcacctgggtggtgctggctgagctgttcccgctcaagttccgcggactgtcgatgggcatatcggtatttttcatgtgggtgatgaacgccatcgtcagctatctgttcccattattgcaggccaagctcgggttaggtccggtattcctgatttttgccgcgattaactacctggcgattgtttttgtcatcgcggcgctgcctgaaacgtccaataaatcgctggagcagctggaagaggagctttcagcaaataaatctgcagcgggattcaatacggccactaaggaaaacggattatgatcgatactattacgcaggataatctccatctgtcgtgccgggcgaaaaataaagcagaagtcctggccatgattggcgcggactttaagtccagagggtacgtcagcgaagattgcgtggcgtttcttgctgaaagagagcgtcaggtctccacctttttaggcaatggcattacgctgccgcacctgcctaaatcagccaccagcatcattgtcaaaacgggggtggagatttatcaattccctgacggcgtgatctgggacagaaataacgtcatgtttattgccattggcgtgattgctaaagagagcgagcacatcgatgtgctgagagaggtggcgtcgatctttagcgatgaagtcatcgccagagcgctgtcgttgattgctaataaagaggattttttaaggatcctccagcagaatcactaagcacggctatctcccgatagtcgcccgatgaaagcctgcttgcgcgcaggctttttgcttattcaggatggacgtagcgattagctgcctttataggtggagtaaccatactggctgagcagcagtggaatatgcagcttttcattggtgcgcgtgacggtgaagagaaccgggatctcggggaaaaacgaggccagtttctgtttgctgaagtcatcgccggttttgaaggtcactttataaatccccggctgcatatccccttcagctggatagagcgatttaatacgaccatcgttgtcggtgacgccggtggccagcgctgtccatttattcgcctgctgtttttcaagggtgaccgtcacgcccgatgaaggcagacccgtctgctgattgagaatatgtacgctgagcgtcccgacgggggcgctaaatgcggctggagccacagacatagcagataacagaatcagactggataattttttcacgatgttttcccgttgtgaataataacgttcaaacgttagcacctgggctgctaaaatatattcaactttttgtgataatcgccttaacggaagcaggacgaggaaaatagcgagcagggcaacagcccattcgaagtgatagaattatctgaatataaggtgcatcgctggggcgtgaataaaggcccgcgcgcttgcgctatacttattttcctccgcgttcacaaaaggaattcatatgaagatatggccagttctgacgggtgtggctatcgccctgacgcttgtcgcctgtaaatcccccactccgcccaagggggtccagccgataaataactttgacgcaagccgttatctggggaaatggtatgaggttgcccggctcgaaaatcgttttgaacgcggcctggagcgggttaccgcaacgtatggtcagcgcagcgatggcggtatcagcgtggttaaccgcggttacgatccgcggaaacagaaatggagcgagagcgaaggtaaagcgtattttaccgcggcgccaaccaccgccgcgctgaaagtctccttctttggcccgttttacggcggctacaacgtgatcgccctggatagccagtatcagtatgcgctggtcagcggtcccgatcgcggctatctgtggatcctgtcgcgcacgccgaccatcccggaatccattaagcaggagtatctgcgcatcgcgcgggatctcggcttcccggtagaaaaattagtctgggtgaaccacgggtaacaggctgaatccacactatcttcagcgaaccaacgagctgaagatagtgtggcgataaggctggaagaggataaataattagtgcgatgacggctggctggagtcggccgcctcttctgcggttttagcgggagcgatactctctttaatctctttggttttattcgccgcatcgttggccaggttattggcatcaacaatcgcgctgtctttaatttttcccgcttcctgcacgatttggtcgcttttctgccgggcatcctgcttaacggcatcagcctgggcctgggcttgctgagcgatagcttccgcttttttatccgcttccgccttgatgctggaggcctggctgctgagattgttcgcctcgtccgccgcctgtttttttatcgcatcaatgtgtttatccgcttcatccttaattgcttcggctttatcggacgccgcctctttaatttgctgcgcgttatcttttgctttatccagatttgcatcaacttttgatgaatcgtcacagccggcgagaattaaacaaacggcagaagcgatcagcgttttactccagagtttcatagtcattcctttatttattaatatcagcgtatcggggaagtcatcaccgcagggttgccaggataattctcataacaatgatgtcatgaaattatttagccccaatacttagccctgcatccctttatttataatcgctaaccaggcagagtcaagttcctgcgccactcccccggcgagggctgacgtaaaaaacccgggcggctgcccgggttggtcactgaaaaaagagtttaggcggtgacggctgattttgtcagcgttgggccggctaacgccagccgggcgccggcatcggtatcggtatattgcttaaagttgtccataaacagttgcgccagactctcggccttctcctgccatttgtcggcagaaggccagccgctacgcgggtcaagcagcgcgctgtccacgccaggcacgctttgcgggatagcgagaccgaataccggtaccgtttcttcgcgcagctcgccggtggtcccgtttaaaatcgcgctgatgatattgcgcgtgtcgcgcagcgaaaggcgcttgccttcgccgttccagccggtgttaaccagccaggcctcggcgccggcctccgccattttggccgccagaacgctggcgtactgcgtcgggtgcagcagcaggaacgccgcgccgtagcaggcggagaacgttggcgtgggctgagtaatgccgcgttcggtaccggccagcttcgaggtaaagccggacaggaagtgatactgcatctgctcggtcgtcagacgggataccggcggcaggacgccaaaggcatcggcggcaaggaaaatcaccttcgacggatggcccgcacgcgacaccggtttcacgatgttttcaatatgcgatagcggataagagacacgggtattttcggtcttgctgccatcggcgtaatccacgctgccatcggctctgaccaccacgttttccagcagcgcgttacgacgaatcgcgcgatagatttccggctcggcctgcgggtcaagattaatcgtcttggcatagcagccgccttcgaagttgaacacgccgtcatcatcccagccgtgttcgtcatcaccgatcagctgacgcagcggatcggtggaaagcgtggtcttaccggtgccggaaagaccgaagaacagggccacgtcccccgcttcaccgcggttcgccgagcagtgcattgaggcgatgccctgctgcgggagcaggtagttcatcaccgagaagaggccttttttcatctcaccgccgtaccaggtgccgccgatcagctgaattttttcgctcaggttaaacgcgacaaagttctcggagttgagcccctgctcctgccatttatcgttggtgcagcccgcgccgttgaggacgacgaagtccggcgtaaattcagccagctcctctgcgctcggcgcaataaacatgtttttgacaaagtgcgcctgccaggccacttcggtgacgaagcggacgcccaggcgcgttgccgggctggcgccgcaccacgcatcaacgacatataatttcttgccgctcagctgtccggcgaccagcgccttcagatctgcccatatctcggtggatagcggcttattgtcgttgcggccaaggccggaatcggcccaccagacggtgtcacgcgtcagatcgtccctgacaatatatttgtcgcgcggcgagcgcccggtaaagatcccggtatccacggcaacggccccggactcggtcatgacgccgcgcgccgcgccggttaattccgggctggtttcatgcgcaatcagcaagtcgtaatcggggttataaaacagctcgctgctctcctgaataccgagcgaaagaagagcgtcttttactgattcaatacgtgacatggcactcctgacaaactattggctggataagatgctattagggtatttcaacctgtcagctaagcggatggatttattttaataaaaaaaccatcgtgaaattaaataaacaggatgaacagaccagagccggcgatgtaaaatcgtgctcgtgtagggtgtcgcctgaactttagaaatatcgtttgcacgaataagtcataagctaactctgcaaaaaatgttaacacctgtagataattatgttaattgcatagtttctatacgtcatgctaaaattgcatagctattattgcagggcagaggaacggatcggtgctggcgaatcttgaagtaaaatggctttacgatgtgattgcccttgaggaatccagaagctttaccctggcggcaaaaagccgcaatatttcccagtcctccttcagccgccgcatccaggcgctcgaggcgtcgctgggcttcagcatcttcgaccgttcggcaaacccgctgcagctgaccaaccgcgggaagatttttgtcggctatgcgcgaaatatgctcgacgacatggacttccagattagccgaattaaagggctgaacaacaccacccagaaaataagaatcgacgcggcgccgtcgctttcagttttattacttccggaaatcatcgccggttataccgaccgaaagaataaaacttttcatgttgaatcgattaacgtcaacgatgcggtgttcaacctgaaagaaggcaaaagtgattttatcctgtcattttataatgaagagctgatgaactatccgtttatcaatcacaaaatttttgactcggcgctgcacctcgtttctccctgcgataaacacggcaggccgctttttcatttacaccgcggggtgctgccgctgatgaaatacgccaacgacagctatatggggcgccaggtgaatcaggtgatcgaccgcaagccggagatcaccttctcgctgacctttgtctcctcgatgagcgagctgttaaaacgcatgatcctcaacggcgacggcgtgggctggctgccgcagtactctatcaagcgcgagcttgaggagggccgcctgacgattatggatgagagcctgtcgctgccgatcggcgcctatatttaccgctccggcgcgcggctcaaccagtcagccgagcgcttctggcagcatattaagtctatgaataccgtgaccgcataactcgcatggcggcgggaaattcgctatcatccgcatccacttcctctccgtgcagcctgatgtctacgattatcgatacctttatcgccccgccgtgccacgctgaaatcgacatcctctacgaggatgaccatctgctgctgatcgataaaccctcaggcctgctgagtctgtcggggaaaaatccgcgtaatctcgactcggtgcattatcggctggtacagcggtttcccggctgcactctggcgcatcgtcttgatttcggcacctccggactgatggtgattgcgcgcaacaaggccatcaacgccgcgctctgccagcagttcagccagcgtgcggtgagcaaagtctacagcgcgctgctgtgcgggcatctggcggatgatgaaggaaccgttgacgctccgatagccaaagatccggcgctgtttccgctgatgacgatttgcccgcgccgcggcaagcctgcccgctccggctatcgggtggttgagcgcctgcgctatcaaggtagcgtgccggtgacgcgggtccagctgacgccggaaaccggccgcacccatcagctgcgtatccactgccagtggcttggccaccctattctgggctgcgatctgtacggcggtctgttgcttccgggaacagaacaggcgccgcgcctgatgctgcacgccagcgaactgcatttcgtgcatccggttagcggagagcggatcgatgcgataagccccagcgggttttaactcgcccgctcgccagcccttttaccgaatctctcccgcacgctgattgacgtcgacgctttaattcgaatcgcggcattgcaaatgcaaatatcatatttgctcgttaatcaccgcctctgtagcttgtgctctattcatgcttttcatgaaagaacattcagggcgcaacggctttatgattaaactcgataatattcgcaagacctaccccggcagcgcgcatgcggctattcgcggccttaatctggtgattaatagcggcgaactgtgcactttcgttggccccagcgggtgcggaaaaacaaccattctgcggatgattaatcagctggatattcctgacgccggtgacgtatacgttcagggcgttaagcttgccgctgccgatattattcaggtgcgccgccaaattggctttgtcatgcaaagcgccgccctctttccgcatcgtactgtcgcgcaaaatatagccacggttccgcgccttctcggctggagcaaaaagcatatccaggcgcgcatcgacgaattagtggatttgatgtctctcgaccgcaacgtcctgccccgctatccgcaccagctttccggcggccagcaggggcgcgtggcgatcgccagagcgctggccgccgatccgcctattctcctgatggacgaacctttcgccgccatcgacccggtggttcgcgagcgcctgcaggacgagctgctgttgctgcaacagcgcctgcgcaaaacgatcgtcctggtgacccatgatatcaatgaagctattcgccttggcgatagaatcgctatcttccaggagggcggcgagctggcgcagttcgccacgcctgaccatattttgtcgcatccggccagcgactttgtgcgccgttttatcggccccgaaccgaatctgcagcggctggggagaattcaggtcggacagctcccgcgccatgacgtgccgcttattgatgagagcctctcccccatcgccagcccgcatccgccggtcgccagtccgctgcgcctggtgctggacaaaaaacggcgtccgctgaactggttcgatccggtaaagcgccggacgctgccggtcgacgcgccgctggcggccatcaacacgctgcgctttgcctacagcgcgctgctggatgcgcccggcggcgtagtggttcatgtcgataccgacggtgaatatcagggcagcatctcccacgctctgctgcagaacgtgctggaaggccacgtggatcttcgccgctatgattgactggccgtggatcctcgacaacaaaatcatgatcggtgaactgctctggcagcatgtacagctggtgatcgttgcgctgtttttcggcaccctcttcaccggcgtattgattagcctgacgctgcgctggcccgcggccgcccagccgctgatctacctgtgcgggatactgttcaccatcccgtctctggcgctgtttattctattactgccgtttaccggactgtcgctgatgacctcaatcatcggcctgacgctctactcgctgctgatcctgctgcgcaacgttatcgccggaatagagaaactcccggcgacggtgctggagtcggcgcgcgcgctgggctatacccgctggtttcgttttgtcgatatagagctgcatctgctgctgccctcgctgttcgccgggttacgcatcgcttcggtgacgctggtcgggctggtgacggtcaccgccttaattggccagggcggtctcgggcagcttctgttagccgggtttaaccagaattttgtcacgcctatcgcggtcagcctggtgctcagcgttgtgctatctctgctgttggattcgctgattgcccgcgtcggctattggctaacgccgtgggcccgctaatggatatcctgcaagcaacatttcactggttattacaaccgcagcactggacaggcgacgcgggaatattacttcgcctgcgcgagcatctttattatgtgctgattagcatcgtcgttgcctcggcgattgcgctgccgctggggattattctcggctactggcgcaagggcgcgtttgtgattattaatctgtttaatattggtcgcgccattccctctttaggtttaattcttttatgcattattgtgtttggctttaatgatattccggtctttaccgcgctggtggcgatgtcgattccgccgatcctcaccaacgcctgggttggcatttatcatgccgaccgtcagctgtgcgatgcggcaaaagcgctgggcatgacgccactccagagcctgtggcagctgcggataccgctcgccgcgccgctgatactcgccggcctgcggaccgcgctggtacagctgatcgcgaccgccgtcgtcgccgcctacgccggccttggcggcctcgggcgttttctgatcgacggacttggccagcgcgatattccccaggtcattgccggttcgctggtggtatcgctgctggccatcggctgcgagctgcttttttcattactctcccggcgcatcgttccggcgccggtcacgcaaataaattaatttcccaacaacaaaaaaccacctgcaggtaaagaggtattatgaagcagctatttagcatttccgcgtatcgtcgccgcttgcgtctttcggtattcaccgcgggattattaagcttaagttttaacgccctggcgcaggacgtcaccattggcggagcgaatttcaccgaaagttcaatccttgccaatatttacgccagcgcgctaaagaaaaacgatattgcggtgaaaacccgtcttaatctcggcaatcgcgagattattattccggcgttgcagagcggcgaaattgatattgttccggaatatctcggtgccctgctgaactattatgacggcaaaacgctggctaccagccagagcgacgttagcgctgagttagccaaagcgctgccggcggactttacgctacttaccccctccccggcctcgtccattaccgcctgggccgtgcgcacggaaacggcaaaaaaatatcacctcagcaagctttccgacctgcagcccgtggcccatcagctgactatcggcggcccgccggaattcccggtgcgcgccctgggcctgccgggccttaagcgcgtctacgggcttgaatttaaggcggtgaaatctctggatatgggcgggccgctgacccgtctggcgctgaactccggcaaaatcgacgtcgccacggtcgtctccactcagggcaacctcgcgaaagaggattgggtggtcctggaggatgataagcatgagcagccgagccagaacgtggtgccgctggtacgcaaagccagcctgacgccgaaaatcagcgaagtgctcaatgaggtctccggcaagctgaacaacgccgcgctgatcgaacttaaccagcaggtcgatctgcagcataaagatccggcggcggtggccgaacagtgggtcaaaacgcacctcaacggcaactgattgccgccatgccagggaaggcatcacctccaactgagccgagaaaatgccaaataatcctatgatcctgaaccttttcttcttcaatccccagggtgactaccgcttttcctggcgtcacccgcaggcgccggagaaggaaattttcagcctcaagtactatgccgatctggcccgtaaagcggaggccgcgacgctcgacgccatttttatcgccgatcatatcgctatctgggacacggtgcccagcggcttaacccactacgctaacgcccggctggagcccatcactctcctctcggcgctggcggcggtgacggaacatatcggcctgatgggcacggcgtccacctcttataacgagccctataatctcgcccgctattttgcctccctcgattttctcagcaacgggcgggccagctggaatatcgtcacctcatggctggaggaggaggcggccaacttcggccttgaccacctgccgcagcacggcagccgctaccagcgcgccggtgagtttattgatgtggtcactcagctgtgggactcgtgggaagacggcgcggtgcgctatgacaaagccagcgggctgtttgccgattccagcaaggtgcatcatcttgatttcgcgggcgagttcttccgcgtgcgcgggccgctgaacgtccctcgcccgccgcaggggcatccggtcctggtacaggccggctcgtcggaggcgggtaaaaacctcgccgccgcctggtcagatatgcattttgtgtttatcaaatctatcgctgaggggttggcctaccgcgaagagatgaaccagcgtttgcgcagccacggccgggatccggcgcatttcaaaatcatcgccggcgttttaccggtggtggtgaattcaaacgcggaaaaggaagagcgccagcggcttaacgagcagctaatgagcgaccagatggccatcgacctgctctcttcctatctgcgcatggatttatccgcttatcccgtcgaccaaccgctgccgccgctgccggaggaagagacctttgatgggatccgcaccgccctcaggctgattcgtgattacgatccgcagttgtcgatcctggcgttgggcaagctgctgttgcaaagctccgatagctggctgctcatcggcagcgccgaggagatcgccagcgcactgacggaaacctggcgcgccggtgccgccgatggttttaacctgatgttcccgctgctgccgggggacttcgaccgcttcgttgagcaggtggtgccgattctgcagcgcagcggcgcgatgcgggatcgctatccgaccggcacgctgcgcgagaagctgggtctgccggtcgtcgaaaaccgcttcgcccgccgggatggcaaaccgctggcttcatagcgcggctgttccccggtggcgctgcgctgaccgggctacgggttcaccgccgtctgcgatccggtagcccggacaggcgcaatgcgccgcctccggggaaggtgctgtgtctgaaacctcggtgcggtttcttcccggcttgcgctgcgcttagccgggctacgggttcacaaccgtctgcggatcggttgcccggacaggcgcaacgcgccgcctccggggaaggtgcgctgccggatgctttgctgcggttttcttcccggcttgcgctgcgcttagccgggctacgggttcaccgccgcccgcggatcggtagcccggacaggcgcaacgcgccgcctccggggaaggggctgtgtctgaaacctcggtgcggtttctccccggcttgcgctgcgcttagccgggctacgcgttcacaaccgtctgcgatcgggtagcccgggcaaggcgcttgcgccgcggcccggggaaattggcgcctacagccgcacgacgcccctggccgccgcctcatcacgccacgccagcagcggctgatagtccgcgcgccgcatatcgctgtagccgcagataaacagcgcttcgcaaagcggccggtagcgttcatcgctcaccagctgctgcaatgcctctctgagcagccccagcgtcgctgcggacgtcgtcgccgacgtaatcagcggcagacccggggcgagcgggctgcgcgcaatcaccgccagccccgccagcgcctccggctgatgacgctgcagcagcgcccaggtcacgcaatcaatggcggcaatatccgccgtcccctgctgaagttcacgcagcgactggcgatggctgccgctaaacgcgaccgccgagaagaaatgcccatcgcgcgacagcggcgcgaccatgtttaacagcacgttatagccggactgggaatccggcgaattgcacacgaccaggcgcccgcgaaaatccgccagcgtctgatcaccgtccgcctcacgtaccgccagcaggctgcggtagttccgcccttcgcatccgggcgccgaatagtgaaaacagccgaccgtttgcactgccggcagccgcgtcatcagcggataaccgcaggtctggctcaacagcagcgccggatggcgccagtgcgtcagcagatcctcaggtacctgatacgacagcgtatcctcctccaccacgccgcgggccgccagcagctgccgcaccgcccgccagagcgcctgagtatcctcgtcattcaccgcgtacatcggaaacgccagcctttcactcatgctcttcatccgccttaccctgctggttgaagccgggatgggcattcaccgccaccggtctggcaaaaaaatgccgcagccattcaccgtagccgcgcaccacaaacccggcgttgcgccgctgatactccgcctgattatgcagatagatttttcgcagcccgtaccacggtacccccggcaaatcgtgatgcactgaatggtagttgagattgaggaacagcactcgccagaccagccccgcctcgttaatcaccgaacgggccagcggatcgtccgcggcgcggtgttcaaggaaagagcgcactttggtcaacgccagcgccgggtagctgatagccagcacaaagtaaagcggcgaaaagccgagatgattcatccacgcgaacagcgccgccagcagcaggccgtgaaccagccacatcgctatcgtgttcacccgccggtgtcgaaatgccgccagcgcgctgccgagcgtctgggcaatatccagcagcggcgccaccagcagcctgccgataaacgtattgcgcagatgaataaggctgcgctgccagggggcaaaacgctgccagctctgcggcgtaaaatagtaggattccggatcgtcaaccggctgcgtcagcaaatgatgatgatggtgcgccaggtgcgagtcgcggtacagcccgtagggataccagaccgccagcggcagggtccccagcagctggttaaaccatggtcgcgacgtggggtgaccgtgaataagctcatgctgcaatgacatataccaggcggtgaaccagatgagcagcagcgtggcggggaaaatgcccagctcgcgccaccaggccagcgaggcaaaccagccgccgtagacggcaacgatcagtagccaggtgggtagctcgctgcgccacagccagctacgggaaaactgatgaatccgctcgcgctgctgcggatgcagatagaccgacctgctttttgccattcctgccactgccttttcgcgttatcgtttgatcctccgaagatgtgagataacgcgttaaataacaaagaatttaaatcgcttagctttgccagaaaatcaccttagccctcgttgagcacgatgatatatcgccacccggcgagcatgctcacgcccgcgcacgccagcagcgacgcccccagcgattgcccccacccggccgccagcagaccggcgccaatcaggacataataaaacaggccgaaaaaggcgccggcggtgccccgacagtcgccgtaggcgctcagcgccgaccccagcaccagcgggatcgccatggcccaggcaagggtgaccagcgcaaccggcgccacaaaccagattgattcccgcagcacgtacaccgcgacgccgccggctaagtgcagaatgcaggcgatggcgagtatccgccccagcgagacattccgacgcagcagccggtggttaagcagcgcgccgagcagcgaacccgcggcaagcgccatgccgctgtagccaaacgtcagggcatcaagatcgaatcgggcgaacagaaacggggccaggctgtagtagctgaacaggctgacgttaaatgccgccaccaggattgccgccagggcaacgcgcgtatcgcccaccatccgccgcagcacgtgaagaaacggccctctcctgaggttttgcggacgcgtttccggcatcaacgccaggcagcccagcagaagcgcggcggccaaaagcgccagcgcgctgaatacgccgcgcatcccccagagggcggtcaacccgccgccgatatagaccccgacggccgggctcaccgccagcgccaggccgataaacgaaaaaattcccgccagctgccgcccgcgatagcagtcccgcaggaccgtctgcgtcaccactgaaccggttgccgcgccagcggccgtgacgatccgcgccgccagcagcagcgaaaaatccgtcgcccacagcgccatcaggcatcccaatgcgtaaacccctaaccccgccagcagggccggacgccggccgtagcgatcgctgaatccgccccacagcaaaacgccgacggcaaaaccgataaagtacacggaaagggttagcgccgcctgcggcgcgctcacggaaaaacgggcgctgatatcggtcagcgccgggctataaatcgtttccgctatttgcggaaacatcagtagcgcggtcaccagcaccagcgcggcacgtcccaacatatccacctcctgattaacaagaggcgctattgtagggaagccgtttatcgaacattataaacataatgactttaaacatcggaaatcagacattatggcctggcttgacgctgacgcggcattcgatccggatgcgttgaaaagtagcctgattggcgtgcagtcggcgctcggtaaccacgactccggcagccaccggcataagatggcacagatcctgtttacccgtcagggatgcgtgcgtttaacgctcaacgatagcgtcctgctgtgcctgctgccaccggggcgcgcggcgtggatccccgctgaagtcagccatcgcgcggagatgaaaaacattgtcgactatcgttccgtctggtttcagccgcagcgttaccctcagttgccaacgcagtcggcgatactcaacgtggtgccgctgctgcgcgagctattagagcgcatcagcgccagcccctgggataccgactgggaggccgagccagcgcggcatctcgccgccctgtgccaggcggaaattcgcgccgccgcgcgggagccgatgatgctcgcgctgccgcaggataaacggctggcgatggtttgcggcgacgcgccgccgccgccgcttgggacgctcgctgcccgctgcggcgccagcgaaaaaaccatcagccgactgtttcgccgcgataccgggatgtcctaccagcagtggcgtcaacagtggcgattaatgaaagcggtcgagatgctggcaaccggggagcggattaccgatacggcgatggcgctcgacttcgccagcgacagcgcctttatctacttcttccgcaccatgaccggcatgacgccggggcgttatttttccgcctgattgtggccgcccggcgtgaacggcggcagcttcagaaaggtgttctgcagcccttcggaccacgctttgcgaatggtattgaaatagggatcgttttcggtgatccgatgctgttcggcgctgctaaggctaccgctgcggtacagcagggtgtccagcggcagccccaccgaaagattgctgcgcagggtggagtcgatcgaaatcagcgcgcagcacatcgcctgctccaggggagtatcgatggtcagaacccggtcgataatcggcttgccgtatttgctctcgccaatctggaaatagggcgtgtcgcgcgtggcttcaataaagttgccttccggatagatatgaaacagccggtgcgtttcgccggcgatctgcccgccgagcagcaggttgcagttgaagttggtattgccgcagttctgctgattgctgctgtcgcgctgaatcacctcctgtaaggttttgccgatcagcatcgccgcgtcgtatagcgaggtcacctgcatcaggttaggctcctgctgggtgcgaatgcgggcgctgagcaggctaatcacgctctgagtggtggccaggttgcccgccgactgcaggaccatgacccgttcgccatcctgatggaaaacgtgcagttttttaaacgttgcaatatggtccactcccgcgttggtgcgggagtctgaggcaaataccagtccatctgacaaacacatggccacacagtaggtcatcgttttttgttcctgccgttattgctgctgcgcctgctgcgaatgctcgcgcacttcagcgttagttaacatgatttcccccccgccgccgaggcgggtgccgcgtaccgggcacgcatcaagatagtccagcccggtcgccagccgcaaatgttgattcaggctgcgcgtgttattggtgatatcaaacgactgccagcgctcgttgagccacacttcggcccaggcgtgcatggcgacgtgctcggcgttatcgctgtaaacgtagccgctgacgtagcgcgccgggatctccagcgcccggcagcaggcgagaaacacgtgggtgtgatcctggcaaacccctttcgcgcgcgcaaaagcatcggcggcggagtcctgcacctgggtggcgcccggcgaatagggcattctcagcagcagctcggccattaaccggttcaggctctcctcctgcgcctccggctgataccagcgctgagcgaattcgcggatcgggccgtcggcgcgggtgagcggcgtacagcgcaagaaaaccagcggcgacagcagctcctgcggctccgcgccgatgtcgtccccctcttcggcgatatcgacgatcccgctggcgcggatggtaatctctttatgcggattatccagcgtcagcacgtgcagcacgttgccccaggcgtcggtggtggcgacggcggaaccgtccggcagggttaatgtccaggcggtgatcttctgccgaccgctgctgcgcggcgtcaggcgcagatactgggtcgaaaacttcacttcttcatcgtagccgtagcgggtcaggtgatcgataaccagtttcataacgcctccagataggtttgtctgatgctgtcggaaagcgcgttaatccgcgccagcagtgcattaagggtgacctgtaaatcggcctgcgccagatcgtcgcgggtgctgaaacgcaggtcgacgttgagctggtgcgccagccgcagcggcaagtgcgagcggtcgttggcaatctgttccagctgcccgacgaggtctgaaatactcgctctcagcgatctcggcacatcgttgcgcaggatcagcagctccatcaccgtttcgcggctgaccggctggcggtaaatgctgttgtaggcctcgcgggcgctgaccgcattaagtagcgtatccagccggtagtattcgcgtaccggatcgggatcgctgttcagctgctgatccttaatcaacagcagctgcgcggtggcggatgcccgctcgatcagcgtcccgatcccgataaagctcagggcgtcgttacgcagcagcgtgccgaggatcgccccgcgaaacagatgtacccgctcttttacccactcaaagaaagcgtcgttgcccagctcgccgatcccctgctggcgcagctttcgcagctcaatgcgcgtggcgttgatgctttcccacacctccgccgacaagctgccgcgcaccgcatgggcgttgttccacgccatctcgacgcaactgaaaatgctgtacgggttgttgccgtcgagcgcgaaaaaattaagcaggttgctcatagtgaaacgcgcgtgccgcgcctgaaacagctcatgggtcagcgacagattcagcggcaaggctaaatcccgcgactgctggctgtggcgggggatcatcgacagcttccaggtcacgtccagcacccgggcatagctttccgcgcgctcaaggtagcgcgccatccagaagagttcactcgctgtgcggcttaacatgattcatcatcctccatcacccaggtatccttggtgccgccgccctgcgacgagttcaccaccagcgagccttcggttagcgccacccgcgtcagcccgccgggaaccaggcggatctcctggccggaaaggacgaagggacgtaaatcgatatggcgcggcgccagcccctcgtcgacaaaggttgggcaggtcgacagcgccagggtgtcctgagcgatatagttggccggattcgccagcaggcgctggcgaaacgcatcgcgctcctctttggtcgagcgcgggccaaccagcatgccgtagccgcccgcgccgtgaacctctttcacgaccatcagttcaagattgctcagcacgtagctgagatcttccgccttacggcactgccaggtgggaatattgctcaggatcggctgctcgcccagatagaagcggatcatctccggtacgaaggggtagatcgatttatcgtcggcgacgccggtaccgatagcgttggccagcaccacgcccccggcgcgatacaccgacagcagccccggtacgcctaacatggagtcggcgcggaaggccagcgggtcaaggtatgcgtcgtcgatacgccggtaaatgacgtccacgcgccgcggtccttcggtggtgcgcatatacaccgccccggttttaataaacagatccgcgctttccaccagctcaacgcccatctgctgggccaaaaagctgtgttcaaaataggcgctgttaaaccgtcccggggtcatcaccaccacgcacggatcgtccaccggcgagctttcgcgcagcgtttgcagcagatagctggggtagcgttctaccggcgcaatatggtgctgttcgaacatttcgggatacagccgcatcatcattttgcggttttccagcatataggagacgccggagggggtgcgcagattatcctccagcacgtaatactggccgtcgctgttgcgcaccatatcgactccggtgatatgggcgtaggtgttattgggtaaatttatcccctgcatacagggttgatactgttcgttcgccagcacctgttcggccgggatcagccccgcgcgaaggatattttgatcatggtagatatcgtaaagaaaagcgttgagcgctttcacccgctggcggatgccgcggtcaatccgctgccactcgccggcgggaataatacgcggcacgctgtcgaaagggatcagtcgttcggtgccctcatcctcgccgtagacgttaaaggtgatgccgatgcggtgaaagagcagctccgcctgctctttcttctgccggatagagaattgatcggtactgcgaaaccattgccaccaggcgttatagtgctgacgctgctctccctgtgcggtaagcatctcatcataataatgcccgtcaggaagcgttatttttatcatggtcgtctcctccggttgtactcactttgaggtaatcccggtaagagataagcattaattatgccaggtaacgcagcgcggcggcgcggcgttacgctgttatgccatgacgctgaattgaataaaaaacaatcagacgctttgcttatttatggcctgtttttcgcgtaaagcgcaccaatttggggcaagtcgattcacgcgatactaacgcgccgccagccacgctgcgtagcgctcgggccactcgacgctgggcgtaccggcccggcccagcgcaaaaccgtgaccaccgctggcgtaacgatacagggtgaccgggacctgatgctgacggcaggcggcggccattatcaacgtattgtgcggatcggagacattatcgtcctccgcctgaaccagaaaacagggcggtgtccgcccgctgacccaggtttgtaccgaccaggcgcgatcgacctcctccgcggcgtgaggcccggcgaggagccgatgggtggcggtatgggtgtacggaggttcgagggaaatcaccggataaatcagcgcggcgccgtcggcccggggcggggtgtcgtccacgccgtcgatcggcgggtaagaggcaaaatcagcgcgacaggcagccattcccgacaaatgtccgccggcggaaaaccccagaaggctgactttggcttcccgcagacgaatcaggcgcagcgcccgctgagcgtcctgcagcggagcaaggccgcccgcttgccacccctccccgggaagacgataggtcagcacgtacgcggtatagccgcgcatcgttagccagcgcgcggcgggccaggcctccttcgccatttcaatgcgtcgatagccgccgccggcagcaattaatacgccgtggccgcgtggcgctgcgggacgccataccgtcagttcaggctgggcgatatggcttagcgcgccgcgtgccgataagcggacggggccgtccggtccgccgccgccgggaggcacgccaggccacaggcggatcgtttgctggctttcagcggcgcgaagacgaccgcccgccagcagcgcggcggcgcttaaaaacaaaaaatggcgtcggttcatcggcggctcctgagacggaaattagtcattaacgagcttgagttccagccagtccaccaccagacccggcttgataaaatcaaagcctacacgatatttccccgactgtagctcaatccgacacagcttctgcacaatctcacgaccgagcgtaccgttggtctggatcgtcgccacaaattgttcattaagcagcaggttgcaggcggtttgtgcgagcggcgcaccgttagcgtgaacgctcaccagcacatcatataccgctgttcgctcaacgctcagcaccagctcctcgtcgtagcgcagccgcgactgctcggcgattttaattgcgccaggacaggccccatcgcacgcaggatccgccgccaggtgaataatccccgcccgcggcatctccccgcgcttaaagacctgcgtctgcatcataaagtcgaggatgtttatcgcgcagcgctgaagctcaccgagcgttagctcgcctgtcgccagcgccgccagggtattatctccccccgcattaacttccgcgccgttattattgaccaccatataaaggtcgttctgcgcgcggatcatcgccgcggtgttgtgggtgctcgccgcgccgccatcgacgggatcgttcatcgttgcccaccagtcggtcatcacgatcccgcgaaagccccactcctcgcgcaggacggtggtggtgagatcgtagttggatgcggcatggtggccgttgaccgggttataagcggtcattaccgcatttgcgccgccggatttcaccgcatactcaaaacctttgagatagatttcacgcagcgcgcgctctgacaccaccgaatccgctttggctctggcgaactcctgattgttgcaggcaaagtgcttgagggtggcaatcccgccgccgctgcgaatgccgcgaaccaccgccgccgccatcatcccggtgagcagcggatcttcggaaaagtactcaaaattacgcccgttcagcggatggcgctggatgttcatccccggccctaacagcaggtcgataccgttgcgcagcagctctttgccttccatcacgtataagcgttccacgaggatcgggtcccagctggaggccaataatgttccgctgggaagcaaagtggcctttgcgccgttatccatgcgaatcccggatgggccgtcggcggtcgatgccagaggaatacctttttccagcaggctgtcggccacgccgccaaaagccgacgcgacgccgggcgtcactttgtggctacacatgccttctccgcgcaccaggcaggccagctcctcaacagacagctgagcaacaaaggcattcatcgtggtacgcccttcagccacgtcgttgagggtcagtccctggttaccggtaagggtgatagcctctggcaaacgctcctcaatgcgcgcgcgcagattaatctcccgccgcggcacgtcctcccactcgatctgatagcgcccatcatcgccgtccgcgaccggttttatacgtacgaaaggcaccgtcggcgccagcacctgctgatggcaggagaggatccgcagcgttttctgcgcgtaccccgcctcgccgtcaaccgccagcggctgtacatcgcgcacgctgttaccaagcagcaaacgataaagccctggctccatcacgtaacagtgtggatgcccggtcgctccgctatcgtccagagaagcaaagcgctccagcggaattgataacgttaaggtttcgctttccccaggtcgcagcaggcgagttttggcaaaagccaccagcgctttggccggtttgccgagcgcgccctgcggcgcctggaggtagatttgcaccacttctttgcccgcgaagcgctccccgcgattggtcacggtgacggtcgccttgatcaggtcgccaaaagtctccgcccgcgccgattgcagggtgaaagaggtgtatgagagaccaaagccaaaggggaactgcagacgctgcggacaaaaggtttcgaagtagcgatagccgacgtaaatatcctcctgatagaggctttgcgcttccgccccccagcagggcgatgccggatggtcgtcgagagagatcgcgatgctgcctaccagcttgccggatggcgtcacctcaccatagagcagcgaagtggccgcctgagcgccgtcggcgccgccgtgccagacgtagagcagcgcgcgaatgcgttgacgcagccgcggatcgtcagcccatgagagatcgataagcccggcggtattcagcaccaccgccacgtcatcaaattcgccgcagacctgatacagcaggttcatttcgtcggcggtgagccgatagccaccttccacgtcggcgttgtcccgatcctctcccgcggtacgcccaaaaacaatcactgcctggctggagaaagcgcgcgcctgacgaatctgctcatcgctcagcggcatctcctgctggcaccagggttccgctgcccagccccctccgccgttgtcgaaggggtgttgttcaacccagcgttcgtagagtccggccagctgcgtattcagcctcatcccgtttcgcgcacgcatcgcctgcagcaaggttgtgctgctcaccacgttaaccgccccaccggaaccggtaccgctgcgatagtagtcaatctgcgttcggccaaataacgatagcggccgttcgggagcgagcggcaacatttggccatcgtttctcaacagcaccgcgccttcggcagcggcggcggcggcaaattcggcaaacccttccagcggcgtccccgcttgactgtcatacatggtgttgtcctgttaactcatgccccgacaggaggcttaatagcataatgaacagagcccgcgaaatgcgggctccgctgtgctcagaagaaatacttgaagcgcagccggccgccgtagcgggagtcttcctggccgtcgccgttgttcgggtgggattcaatccaggatgcgtaggcgcccagatagatgttgaagttcttcatattcatcacgttcggaaacagatacgacgcatgaatggtgtggatatcatattttcccggatcggcgatccagcagttatcgtcgcagttagcgataaagttagcggtattaaagctttcaatcttgttatgcgcgtaaatgtagcccagctcaacaccgtgccacagggagttcaccccggcggtaaagtcggtttcatcttcggcatccatataagcgacgttaaggttggtcaccacgccatccagcggatcggttttttgcccgttccacgtcatcgtatagccatagccggtgcggctggactggtcgacccagcgccctttcgcatcgtgatagccataggcgttattcaccacgttgctctccatggcgatggcggtggagaagcgtccgctgttccacgcaataaccgggcgtaaataggcgacatttttctcattttccagttcagtaccgtgatactgctggtcctggaacagcgtgctgccgttttccagcagggtattgagttcaaaataccagttatcaagggttttgctcatcaggaagttgccgccgctgctgctgcggccgcgcccttccttcatcatgtagatatagccgtagccgtcgctgtagagatcgttggcggtgttcccggagtattccacgaacgtatcctgattcagcgggaacatatcgtaggcttcgaaacggccgaccttcaccttccagtcgttctcctggccaaaaaagaataccgcatcatcaagattcattttgccgttcaggtcagccagcggctggacggaaaaaccggcaaagctgcggttatccattttgcgcataccgtcaaaacctagcagcaggcggccattaatatcccagcgttcgttattgcccggcgcccaatctttattcgccgtggtttttaccgaagtcaggctaccgctgctgctggcgccatccatattgaattccacatcgccataaaatttgatatccccgtagccggacagcgtcagtttcgtcggctccgcgcccggtgcgacgggctcggcggattccacttttacggttggcgtacttttcgccacagcggcctgctgccgggttaaggtctgaattttcgcttccgcatcggccgcccgttgctcagcatttattaagcgctgttccagctgcgctaaacgcttttcaatatccgcaggagcattatttgtcgctgcccaaaggccagaggagaacaggccactaataaccagagctatatactttactttcattattaacatccctaattacattattatttgtttcatccagggtaaaaccagggctatccagagaaatagtctgtacagccctttaaatacggtgttgaataatcaggattcagcgaaggttccgtggtttaaatcatcgacgatgccgttcattctcttttccgttaagccgtagaatttaatagagacggcggtaataacataaaaaacagaaggaaccagggtgaacaacagcaccacgccctgcaccgctgaagctggctgcaccgcggtgttagcggcgtaatggtaataggccaatatccagccgaggatcgccccgccaacggcgacgcccagcttgataacaaagatatttgccgcaacgttcataccggtaatacgccgctgggttttccattcgccatagttattcacgtcggtaatcatcgaccactgcagcgcgccgttgccgccctgaataatagaaatcagaatatgcacgccgagcaccgcaatccagaattgcaccggaacgataaagcagaccacgcccagcgcggcggtgagcaggttaatccagaaagagagtcggaccttacaaaaacgcgtcccgaagggcttggccagcaccgaacccagcatggaggcaaacatcccgccgagcatgaatatcgttatcacgtcggcgcctttatgcagcacgctattcacatagtagacgacggcgccaccgcgaatcactacggcgaccagcatcataaaattgtaaacggaaagaatacgccactgatcgttacgaaacagtattttcacgtcccgcgctacgttcaggttctcttctttaatcggctgcacgcgctctttggtggtggcgaagcaggtgataaacatcaggcagccgataacgccaaacagggccatcgagacctgaatgccggtcgcgcggtcgccgggatagagaaagtcagccagcggtaaaataaacgcggtaccgagcgcgccgccgattggggtgatagcgaaacgccaggactgcagcgagaggctttcgcgcggatcggaggtcagcgccgcgcccagcgagcagtaaggaatattaatcgccgtatacatcagggtcataaatatataagccgccacggcgtaggcaatttttccggagtcggagaaagagggaatggaatacaccagcacgcagctcaccgcaaaggggacgcagatcgccagcagccaggggcggaaacggccccagcgggttgaggtggcgtcagcaatcgcgcccataatcggatcggtaatcgcatccagcagacgaaccagcaaaaacatcgtccccatcacggcgggcggcaggccataaatatcggtataaaaataagccagaatagccacggacgagtcaaatacaatgtgactggccgcgtcccccaggctatagcctattttctctctgacagaaattttgtcgccagcagacatacaccactcctttatgcaaaatgaaaccggtttctgtaatgtctgcattttttacttatccgctatgcgggcgccattatgttttttaattaattatttatgttttttaatttatgtgatcctgtcagccttcagtcatattaatcccgggaattctgtctgacagatcacaggttttcatcctttgcgcaatttttaaaaggcgataaatatgaccattattgtcacagataaacatcagttccgttttctatttactggcattactattgaacggtgttttttatttgcgcaaaaacattcataacacaaataacatcatgccagtttcatatgattaagattataatattgtgcttagcacaatagtgccggttggctgccggccagtgggcggtaaatactctgttttcacgtaaaatgttacctcggacacgcgcagcggcggatattcgtctaaggttttctgatggccgaatgcagtggcacatagtctgcaatgataaggagaacaatctatgacgagtcccgtttcccgtcgccccgctaccctgccttttgctcttcgtctggcgctagggggcgcgtttgtcgccctggcgacgttgacggctcaggctgaagaaacccgtcccaccccgcaatcacccgatatcctgctcggtccgctatttaacgatgtgcaaagcgcgaaacttttttctgaccagaaaacgtttgctgacgccattccgaacggcgacccgctgatgatccttgccgattatcgtatgcagaaaagccagaccagctttgatttgcggcacttcgtcgaactcaactttaccctgcctcgcgaaaacgaccagtacgttccgccaaaaggacaaacgctgcgccagcatatcaacggattatggcccgtactgacccgcagtaccgtcgacgtcgaaaaatgggattcgctgctgccgctgccaaagccctacgtggtgcccggcggacgctttcgcgaagtctattactgggacagctacttcaccatgctcggcctggctgagagcggccactgggataaaattgaagatatggtgaccaacttcgccgcggagatcgacgcctggggccatatacccaacggcaaccgcacctactatctgagccgctcgcagccgccgttcttcccgtttatggttgaactgctggccacgcacgagggcgatgaagcgctcaaaaaatggctgccgcaaatggagaaagagtaccagtactggatggatggcgctgaggcgcttgagcccggcagcgccagtaagcgcgtggtgcggatggccgacggcgccctgctcaaccgctactgggacgataacgacacgccgcgtccggaatcctggctggacgacgtcacgaccgccaaaaacaatcccaaccgaccggccacggaaatctaccgcgatctgcgctccgccgcggcatccggctgggacttcagctcccgctggatggataacccgcagcagctcggcaccatccgcaccacctcgattgttccggtcgatctgaactcgctgatgttccacatggaaaaagccatcgcccgcgccagtaaagcggcaggggatagcgctaaatccgcgcagtatgacgccttagccaacgcccgtcagaaagcgctggagaaatatctgtggaacgataaagagggctggtacgccgattacgatctgaaaagtcataaggtgcgcaatcagctgaccgccgcggcgctgttcccgctgtacgttaacgccgcgtccagcgaacgcgccgcgaaggtcgccgccgccaccgaagcgcgactgctcaagcccggcggcctgaccaccacgaccgtcaatagcggccagcagtgggatgcgccgaacggctgggcgccgctgcagtgggtcgccgctgaaggcctgcaaaagtatggccagcagaaaatcgcaatggaggtgagctggcggttcctcagcaacgttcagcacacctacaacagcgaacagaagctggtggaaaaatatgatgtcagctcgaccggaacaggcggcggtggcggagagtatccgctacaggacggctttggctggaccaacggcgtcaccctgaagatgctggacctggtgtgtccgaaagagaagccgtgtgactccgtccccaccgcgcgaccggcggcaaatgacgacaacggcaaagcggcggacgtctcggcgcagcctgccgctcagcagccggctgcggtagaggagaaaaaagtcgcgccgtaaacctccgcgcggcgggggcccgccgcgcgtctttatcaatttgcagttccagaatcggccgggccgacggctccccggcaagttgaacctgcggggagcgccctttacatggcgtccagcgccttctgcagcttccagatatagcgcggcgcctgcggtgccggatgctttttcaccacgtgctcaaagaaatcatcggcgtccatatcgttaatctcttcaatcgcatcctggcgattggacgagaatgtccgcagcagcgcgcccgcgccgttggcataggagaccaccaccgcatagcgcatcacctgcgggtctttaatccccgccagcggaccgttttcgaggatgctgaggtaggccgcccccatcgaaatattgcgctcgggattcttcagctcgctcaccgaaggatccccgctccagcccatccgccggtaaacatcgcgaccggaggtcgagggcttcagctgcatcaggccaaccgcgccggatttgctgaccaccgtcgggttaccgccggactcaatggcgatgatggcggtaatcagctggggatcgacgccccacgccgcaccggctttttcgctgattggcatccactgcatcgcccgcttaaccgggacttccgggttccacggcgggttacgataatcgtgttttgaactacaaccggccaacaatacacataaaaaaacacaccatctcaatttcacacatctatccttattggctgaagtttgccgcacggagatgacaataaacgctccaggcggcatgataaccctttcattcttagcaaggaattgtcatgtctcagttttatctcgtcgccccttccggttactgcatcaaccaggaagcggcgtatcgcggcgtgcagcgtctgcaggaggccgggcaccaggtcgcacaccaggaagtcattccccgccgggcgctgcgctttgccggaactgagaatgaacgccttgccgatatcaaccagctcgccgccctcgccggtaaaaaccgcatcgtgctggcggtacgcggcggctacggcgcgactcgcctgctgccgcagattgactggcaggcgctgatcgcgcgccagcagcaggatccgctgcttatttgcggccacagcgatttcaccgccatccagctggggctgctggcaaagggtagcataatcacttttagcgggccgatgctggcgggaaacttcggcgctgaaacgctgaacgaatttaccgagcaccatttctggcaggcgctgcgcaacccggcgtttacgctcgaatggcacggtgaaggcccggactgtcgcgccgacggcacgctgtggggcggcaacctggcgatgctgacctcgcttatcggcaccccgtggatgccgcagattagcgacggaattctggtggtggaagatattaacgaacacccgttccgcgtcgaacgcatgctattacagctgctcaacagcggtattctcgcgcgccagcgggcgattatcctcggcagttttaccggcgcaaacgccaacgactacgatgccggatacgatctgcctatggtatacgactaccttcgccagcagcttaacattccggtcatcagcggcctggatttcggtcacgagcagcgtacggtcaccctgccgcttggcgccagagcattgctggtaaacaacgcatccatcaccacgttaagcatcagcggccacccggttctggcggaataaaaattcctctaacgcatatcccgatcggcgtcagattgttaaaatggtgtagtttttaatttatcttcacgccggtaaggagtacgtcaacattggacgccgctgcggtcattagtctgtttatcctgggttctgttttagtaacctgtagtattttattaagttccttttcctcacgcctcggcatcccgattctggttatcttcctggcgattgggatgctggcgggcattgacggtatcggcggcattccgtttgacaactaccctttcgcctacatggtgagcaacctggcgctggcggttatcctgcttgacggcgggatgcgcactcaggccagctcttttcgcgtggcgctgtggcccgccctctcgctcgccacggtcggggtgctaatcacctcggccctgaccggactgatggcggcctggctgtttcatctcaacctgattgaagggctgctgatcggcgctatcgtcggctcaaccgatgccgcggcggtgttctcactcctcggcggtaaagggctgaacgaacgcgtcggctcgacgctggaaattgaatccggcagcaacgatccgatggcggtgttcctgaccattacccttatcgagatgattcagcagcacgagaccggcctgagctggatgttcgcggtgcatatcgtgcagcagttcgggttgggtatcgctatcggcctcggcggcggctatctgctgctgcagatgattaatcgcattgtgctgccggccgggctttatcctctgctggcgctgagcggcgggatcatgattttcgccgccaccacctcgctggacggcagcggcatcctcgcggtctacctgtgcggattcctgctcggcaaccggccgattcgcaaccgccacggtatcctgcaaaacttcgacggcctggcgtggctggcgcagatcgccatgttcctggtgctcggcctgctggtcaccccgtccgacctgtggcctatcgccatcccggcgctcattctgtcgatgtggatgatctttatcgcccgtccgctgtcggtgtttgccggtctgctgccgtttcgcggcttcaacctgcgcgagcggatatttatcagctgggtgggcctgcgcggcgcggtgccgattattctcgccgtcttcccgatgatggcgggcctggagaatgcgcggttgttctttaacgtggccttcttcgtggtgctggtctcgctgctgttacaggggacctcgctctcctgggcggcgaagaaagccaaagtggtggtgccgccggtcggctcgcccatctcccgcgtcgggctggatatccatccggaaaacccgtgggagcagttcgtgtaccagcttagcgccgaaaaatggtgcgtcggcgcggcgctgcgcgacctgcatatgccgccggagacgcggattgccgcgctgtttcgcgacaacgtactcctgcaccctaccggcagtacccggctgctggaaggcgatattctctgcgtgattggccgcgaacgtgacctgcccgcgctgggtaaactgttcagccagtcgccgccggtggcgctggatcagcgcttcttcggtgattttatcctcgatgccagcgccagatttgccgacgtcgcgcagatttacggcattgacgggggagaagagtttcgcgatcgccagcagtcgctgggtgacgtcatacagcacctgttaggcgccgccccggtggtcggcgaccaggtggaatttgccgggatggtgtggacggtggcggaaaaagaagaggatcacgtactgcgggtcggcgtacggatggcggaagatgaggcggagtgatccgcctcaggctaagttacaccgtcacaaccggtacgcgcggcgcgagcgcgcacattaattcatatccgacggtgccgcaggcggccgcgacatcgtcaattttgatctctttgccccacagctcaaccggcgcgccgatccctgcctgcgggcatggggttaaatccacggccagcatatccattgagatgcgcccgaccgtcacggtgcgtacgccgtcaaccagcaccggcgtaccgctcggcgccagccgcggatagccatcggcatagccgcaggcaacgatgccgatacgccgctcctccgccgtgcgccaggttgcgccgtagccgaccgcttcaccggctttcaggttctgtacggcaataatttcgctgcttagcgtcatcaccggtttcagcccggtgttggccacgtcctgccacaggccggaaggcgaggcgccgtacagcacgatccccggcctcacccagttaaaatgcgactccggatgccacaaggttgccgccgagttcgccagcgagcgcgggcaatccagcccttccgccgcctgctcaatgcgccgcatcggctcgacaatgccgtccgggttttccgcttcggcgaaatgcgacattaacgtcatttcgctgacgttaccgagcgctcgcagctgctgccagacgatgtgcaaacggtccggcataaaacccagccgattcatcccgctattcaccttgacgtaaatatcgaggggcgcgtgcagcttcgcctgctgcagcgccttgatttgccagttactgtgcacgctggtagtcaatcggtatttatcaaacagcgccagctcatcggcatggaagaaaccttccagcatcagtatcggccctttccagccgagctcgcgcagcaggatcgcctcttcaagattgagcatcgcgaaaccgtccgcggcgctcagcgcgttccagacccttgccaggccgtggccataagcattggctttgaccaccgcccacaggcgcgagccgggcgccgcgcggcgaacaatgtgttgattctggcgtaaggctgacatatcaatgctggcctttacaggacgagacatgaaagctccttgttaattgtgaacgccatgcagatgctgagcgcgggccggcgtaaagccgcggccgtagcgggcgacggcaagatcgtcatacgggatcgccggcgtacgcccggagatcagatcgctgatcagctggcctgaaccgcaggccatggtccatcccagcgtgccgtggccggtgttgagccacagatttttatacgccgtgcggcccaccaccggcgtaccgtccggggtcatcggacgcagtccggtccagaaggttgcctgttcaacgtggccgccgcgcgggaacagatcgcgcaccaccatctccagggtttcacgccgcggctgcagcagttctttattaaatccaacaatttccgccattccgccaacgcgaatacgcctgtcgaaacgggtgatggcgattttgtaggtttcatcaaggatagtcgaaaccggcgcgccgtcttcttgcgcgatcggaatcgtcagcgaatagcctttcagcgggtagaccggaatatccaccagccctttcagcatggccgtcgaatatgaaccgaatgccatcacgtaagcgtcggctttgatgatttcagcgccgcacttcacgccggagatgagatccccttcatagagcagttcatccaccggtgtattaaaacggaaagtcacgcccgcctgttccgccatcagggccagacgcgtggtgaaaagctggcagtcgccggtttcatcattgggtaaacgtaaaccgcccgtcagtttatggctcacttccgccagcgccggttcaacgtccagcaggcggtttgcctccagcagctggtaaggcacgcccgcctcctgcagtaccgcgatatcgcgggtcgcgttttcgaactgcttgtcggtgcggaaaagctgcagcgtgccgccctgccggccttcatactggataccggtgctctcgcgcagcgccttcaggcagtcgcggctgtactccgccaggcgcaccatacgtcctttgttttccatatagtggcgagtgtcgcagttgcgcagcatctgccacatccatttcagttggaacggcgtgccatccagcccgatagccagcggcgcgtggcgctggaacatccacttaatcgccttcaacggtacgcccggcgccgcccacggcgcagcgtagccgggagagatctgcccggcgttagcggcgctggtctcttcggccggccccggctgacgatcgataaccgtcacttcatgtcctgcctggcttaagtaccaggcgctagcgactccaactaccccacttcccagtatgacgacgcgcatagcggctccgtaatcgttaaagaacaatcatctgattacaaattgataactcagatgaaaatattattcaacatacgctttatttatggtgacttatctcacagggttctgcgccagctctgcccccgtcggtttaccatctcctgctgcgcctcatttttctacagaataaaatcctgtttaaaccgcaaaaaaacgcctataagattgtgaaatcgcgaagaaaagaaaatgtggatgcacgcagtttgcgacgccgtgttctatgcttgttaagaggttttccgtacagagagaaccatcaacaacgagggcgcgctaatggctacgattgattccatgaacaaggacacaacccgtttaagcgatggacccgactggacttttgagctgctggaaacctatctggcagaagtcgatcgggtggcgaagctgtatcgtcttgacacctatccgcaccaaatcgaagtcattacttccgaacagatgatggatgcctactccagcgtcgggatgccgattaactatccgcactggtcgtttggtaaaaaattcattgagaccgaacaggcctataagcacgggcaacaggggctggcctatgaaatcgtcattaactccaacccctgtatcgcctatttgatggaagagaacaccatcaccatgcaggcgctggtgatggcgcacgcctgctacgggcacaactcgtttttcaaaaataactacctctttcgcagctggaccgacgccagctccatcatcgactatctcatcttcgcgcgtaaatacatcaccgaatgtgaagagcgctacggcgttgatgaagtcgagaagctgctcgactcctgccacgccttgatgaactacggcgttgaccgctataaacgcccgcagaaaatctcgctgcaggaggaaaaggcgcggcaaaaaagccgggaagagtatctgcaaagccaggtgaatatgctgtggcgcaccctgccgaagcgcgaagaggaaaagaccattgaagcggcgcgccgctatccgtctgagccgcaggaaaacctgctctactttatggagaaaaacgcgcccctgctggagccatggcagcgtgagatcctgcgtatcgtgcgtaaggtcagccagtatttttatccacagaagcagactcaggtgatgaacgaaggctgggcgaccttctggcactacaccatcctgaatcatctttatgatgaaggaaaagtcaccgagcgctttatgctggagtttctgcacagccacaccaacgtggtgttccagccgccctataacagccagtggtacagcggcattaacccctatgcgctgggttttgccatgttccaggatatcaaacgtatttgtcagtcgccgacggaagaggacaggtactggttcccggatattgccggatccgactggctcgaaaccctgcacttcgccatgcgcgacttcaaggatgaaagctttatcagccagttcctgtcgccgaaaatcatgcgcgatttccgcttctttaccgtgctcgatgacgatcacaacaactatctggaaatatccgccattcataatgaagagggatatcgtgagattcgttcgaagctttcagcgcagtacaacctgagcaacctcgagccgaacattcaggtatggaatgtggatctgcgcggcgaccgttcgctcaccctgcgctacgtgccgcacaaccgcgtgccgctggataaaggccgccgcgaggtgctgaagcacgtccaccgcctgtggggatttgacgttcttctggagcagcaaaacgccgatggtagcgttgagctgctggaacgcacgccgccgcggcccaatccgctgtagcgcgtaaaaaagcaaaacgcccggtgacagaaccgggcgttgtttattcgtgggcggggtctagcgcatattaatcgccaggtcacccggcaaattcttctgcatacgatgccaaatctccccgctgtcatgcccgtagcggcgaacgatttcataaacctgttcatgaagcccttcttcacatactttcgccagctgatgatagaagccgagcgccaggctacgcgcttccgggttggcaaaatagtgacgacctatgcgggtgtacagacctttcatcccgttgaggatcaggccgtagatggggttacctgaagcaaaggccagaccgcggaagatattataatccagctcggcaaacgcatcggcgtggtcttcaatttcacgcgcgctcgccagaacctccagcgctttatccgggtgctgacggaaagcggtgcggataaaaatagtcgaaatattggtacgcacggacagcagattatcaatcagctgcggaacgctgtcgtgatcgagacgcgcgagggtttcgagaatattcagacctgacgtttcccagaagttgttcaccctggtaggcttaccgtgctgaatagttaaccagccatcgcgggccagacgctgcaacacttcacgtaaggttgtacgggtaacaccaatcagttcagaaagttcacgttcagcgggaagaattgaaccaggagggaagcggttattccagatactttcaatgatgtactcttcagcgaaacccgcagggctttgcgccttaatgaccataataagatttccattacacagcgttgctattcgactcatcataccagagcgaccataaggcagatagcgccagaaagtaattaaaaagggatcgccgtttcattttcaacttttcatttcacactttctgtggctaaagaacgtgatgcgaagaaagttgcgtctcgttttgcgcaactggtaatcttgcgtatagttacgcataaaatcatgtttcagaatttgacggagaaaggatgtctgtcgtggaaatgtcgtatggccgcgccctgtggcgcaactttcttggtcagtccccggactggtacaaactcactctcatcattttcttgatcgttaatccgctggtcttttatcttcatccgtttattgccggatggctgctggttatcgaatttatcttcaccctggcgatggcgcttaaatgttatccgctgctgccgggcggcctgctggctattgaagcggtatttatcggtatgaccacgcccgggcatattcgcgaagaagtggccagtaatcttgaagtcctgctgctgctgatgtttatggtggcgggtatctacttcatgaagcagctgctgctgttcatcttcacccgtttgctgctcggcattcgcagcaagatgctgctgtcgctggcgttttgcgtcgcgtccgctttcctctccgccttcctcgacgcgttgaccgttgtcgccgtcgtgatcagcgtagccgttggcttctacggtatttatcacaaagccgcttcggcgcggccggacgatgacaacatgctcgacgacagccatatcgagcagcactatcgcgatgttctggagcagtttcgcggcttcttgcgcagcctgatgatgcacgccggggtcggcaccgcgctcggcggcgtaatgacgatggtcggcgagccgcagaacctgattatcgccaaagccgcgggctggcacttcggtgaattcttcatgcgcatgctgccggtaagcttaccggtgctggtatgcggcctgctcacctgcctgctgctggagaaattccgcctgtttggctacggcgaaccgctgccgccaacggtgcgcaaagtgctgcaggagtttgacgatcgtagccgtcagagccgcagccgccaggatcgcctgcgccttatcgcccaggggattatcggcgtctggctgatcgtcgcgctggcgctgcatctggcggaagtcggcctgattggcctgtcggtcatcgttctggcaacgactttttccggcgtcaccgacgaacacgccatcggcaaagcgtttaccgaagcgctgccgtttaccgcgctgctgacggtcttttttgccgtcgtggcggtgatcatcgatcagcacctgtttgccccggtgatcgaatttgttctccaggcctcgccgcacgcccagctgtcgctgttctatctgtttaacggcctgctatcatcgatttcggataacgtcttcgtcggcaccgtgtacatcaacgaagtgaaagcggccctggagcatgggacgatcggcctgccgcagtttgagctgctggcggtggccattaataccggtactaacctgccatccgtcgccacgccgaacggtcaggccgcgtttctgttcctgctcacctccgcgctggccccgctgattcgcctctcctatggccgtatggtgtggatggcgctgccgtatactctcgtcctgaccctggtgggcctggcgtgcgtcgagtttaccttgatgccggcgacccagtggatgctggagcagggttggctggtgacgcctcagctgctgaaataaaaagcaatacccggatcaaaaatccgggtattccatattcgcttacgtaatattttcagactagctgctggcgtcgcatcggttttcgtttacactgccatgatttagcatgttccagggaaatgattatgttgcgatatttaaaccagtgctcaaggggacgcggtgcctggctcctgatggcgcttaccgcgtttgttcttgaattggttgctttgtggttccagcacgtcatgctgctgcaaccctgcgtactctgtatttacgaacgctgcgcgctttttggcattatgggtgccggtattgtcggcgccattgcgccaaaatcgcctctgcgctatgtggcgattattatctggctctacagcgccctgcgcggactgcagctggcatgggaacacaccatgattcagcttcacccatcccccttccagacctgcgatttcgccgctcgtttccccacgtggctgccgctggataaatggctgcctcaggtatttgtcgccaccggtgactgctccgtacgccagtgggaattcctgacgctggaaatgccgcagtggctggtcgggatcttcgccgcctatctggttgtcggcgcgctggtgcttatcgcacagccgtttaaacctaaaaagcgcgatctgtttggtcgctaagaacgattgctgataaagcgctcctccgggagcgttttttttgcctgcacgttgacgtcggtcacataaagttgcatattaaatgcaacttatcgatgttaactaaggagcacatgatgtctcatttgcgtattcccgctagctggaaggtaaaacgctccaccccattctttaccaaacagaacgtccctgccgctctgctgacgcaccacaacaccgctgcgggtgttttcggccagctttgcgtgatggaaggtacggtaacctattatggtttcgccgacgaacaggcgacagagcctgaagcaaaagtcgttatcaacgccggacagttcgcgaccagcccgccgcagtactggcaccgcattgagcttagcgacgacgcgcagttcaatattaacttttgggttgcagatgacgccgacggtgaaagcgggctatttcacgcgaagaaaggctaactgagcgcctactgcgcccagtctggtttattcaggatatgatcctgccagtcaaccaccgtggattctttcacagcaatatggcgaaccgagatgcgttcgccatgcatcgccgccttcgaaccggttaacagcgggtgccagtgcggcagcggttgaccttccgccagcagacgataggcgcaggtcggcggcagccattcaaacgtaggcaggttgtcgcgggtgagcttaatgcagtccggttcatattcgaaacggcgctcatagttacggcactggcaggttttgatattaagctgacggcaggcgacgttggtgaagtagatttcgtcggtatcctcatccatcagcttatgcaggcagcactgtccgcagccgtcgcaaagtgattcccactccgcatcgctcatttcatccagtgttttgtgttgccagaaaggttgttcgctcattgggatgtccgtcattgcagttcagggtgcaccttataaccagtctggcacgccgatgcaagttttgccgcccggagaaggcggcaagcggtcgttacagcacgcgggtggtcagcgaaaacccgttaaaaccgacttccagctcgtcgccgctggcgagcggccccacgccttccggggtgccggtcagcaccacatcaccggctttcagggtgaagaagcgcgacatataggcgatcagcggcacaattttatgaatcatgtcggccgtcgtgccctgctggcgcacctcgccgtttaccttcaggctcagcggcgtattctgcgcgtcgccgtgaaattcgccggcgggaataaaccccgaaatcgggcaggagttatcaaagcctttcgccttttcccacggctgcccggcttttttcattttgccctgcagatcgcgcagggtgaggtccagcgccacgccatagccggcgatggctttgagcacatgatcgtccgtcgcctgacgcagcgtgccgccaatcagcaccgccagctcaacctcgtggtgcaccgaccccagcccctcaggaagcaccaacggctggcggatatcgcatagcgccgtctcaggtttaataaacagcaccggctcttccggcgtcgcactgcccatctccttgatgtgttttgcgtagttgctgcccacgcacaccactttgcttaccggataatccagtagcgcaccctgccagttatgatgttggtacattgttttccctctgtgggttaatcagatttattcccctgttccgccaggtgtttcttgagtaaattttcagacggaggagggagctgaaggtaatagccctgatcggccagcgcctgtttcactttatccaaatcggcgtggatgagtttttttcgcccatcgagcggtaaaatcattgccagtttaggcgtaccgaagctatacattaattcgtcaggaacgcgggagaaatcgtcctttttttcgacatataaataggtttgctcacgtttagtacttcgatagatcacacaaaacatagttttactcggaattagacctgtggtcacttgcctctatatatgagtgactataacatgccttttagtcttcggaatatcaccgcacttcagcgagtgataaacagcaaattgagtaaggccaggatgtcaaatacgccaatcgaacttaagggcagtagcttcaccttatctgtgattcatttgcacgatgcaaatcccgaggttattcgtcaggcgttagaagacaaaatcgcccaggctcccgcctttttacgtcatgcccccgtggtggtgaatatcagcagcattgaagatgacgtcgactggcgccctcttcatgaggctatcgcggctaccggtctgcgtattatgggcgtaagcggatgtaaacttcctcggctgaaaaccgaaattgaccgcgccgggatccctttattaaccgaagggaaagaaaaaattacccgtcaggccgcgccagaacccgttgccccgccgccagctgttaatcagatcacaaaaacgcgcttgatcgatcagccggtacgttccggtcagcgtatttatgcgccacactgtgatctaattgttacaaaccatgtgagtgccggggctgaacttattgccgatggtaatatccatgtatatggcatgatgcggggacgtgcgcttgccggcgccggcggcgacagagacgcccaaatattttgcagcaacctctcggcggaactggtttccatcgccggggaatactggctgagtgataacattccggccgaattttatggcaaagcggcccgtctacgtttagacgacagcgctttgacgattcaatcgttgaattaatccctttttaacaaggaatttctatggcacgcattattgttgtgacttcgggtaaaggaggcgttggcaagaccacctccagcgcggccatcgctactggtttggcccagaagggaaagaaaacggtcgttatcgacttcgacatcggcctgcgtaacctcgatctaatcatgggctgtgaacgccgggtcgtttatgacttcgtcaacgtcatccagggcgatgccacgttgaaccaggcgctgattaaagacaagcgcacggagaacctctacatccttccggcctcccagacgcgtgacaaagacgccctgacccgcgaaggcgtagacaaagttctcgaagaactgaaaaaaatggattttgattttatcgtctgtgactcccctgcaggcatcgaaaccggtgcgctgatggcgctgtacttcgctgatgaagccatcatcaccaccaacccggaagtctcctccgttcgcgactccgaccgtatcctcggcatcctggcctccaaatcccgccgcgcggaaaggggcgaagatccgattaaagagcatctgctgctgacgcgctataacccaggccgcgtaaacaaaggtgacatgctgagcatggaagacgtgctggaaattctgcgcatcaatttggtgggcgtgattccggaagatcagtccgtgctgcgcgcgtctaaccagggcgaaccggttattctggatgacgcctcggatgcgggtaaagcctatgccgataccgttgaacgtctgctcggagaagaacgccctttccgcttcgtagaagaagagaagaaaggtttcctcaaacgcctgttcggaggataaattatggcattactcgacttttttctctcgcggaaaaagaacacggccaacattgcgaaagagcgcctgcaaattatcgtcgcggagcgccgccgcggcgacgctgaaccgcactatcttccgcagctgcgcaaagacattctcgaagtgatttgcaagtatgtgcaaatcgacccggaaatggtcagcgtacagctggagcagagggacggtgatatttcgattctggagctgaacgtgaccctgccggaaactgaagagtcgaagtcctgagcctgaaggtataaaaaaaccggcaacgctgtgcgaagccggtttttcactatgccgttcggcgctagcgcgggtagtcgctcaatagcgcattcaggcgatcggccatcaattctccgcgccagccggaaaccagttcaggctgcccgttgccgtttttaagcccccagtgccagttcagcagctggttaatctgtcttcttgaggccagcagctccgcgctgacgcccttctcggcgctcacggtctgcacaagcgctttaatatccttaaacagcttgcggtagcccggcatgtcgatcaggttctgcagcggctctggcagcgcctcttccggcagcgcctgcgctttctcgacaaggccgatcagcgtcttgccgtggaaacgaatttcgctgcccgagagtccgaggctgtcaagctccccgaggctggtgggcatatagcgcgccacgttccacaaatgctcttcccggatcacaaagttgacggccagatcgcgctcgcgcgctttgcgcagacgccactccgccagcagctgcaggctgcccagctgacgagtacgcagctgccaggcattaccgatatcgcgccacgcctcggcgggatcctgaatctcctgacgccgctgctgcatcagctgacattcatccagggcggcggagagccagcctgcgctgtcggtctcagccatcagctttccggcaatcggcagcaggtaccagacgtcggcggcagcataaatgcactggcgttcggtcagcgggcgcgccagccagtcggtgcgggactcgctcttgtccagcgccacgccggtaaactcttccaccatcgacgcaaagccccacgacatcgggcggccgcaaaaagcggcgagaatttgcgtgtcgatcagcggctgcggcatcaaatgaaaagcattgaggaatacttccagatcttcactgccggcgtgcagaaatttggtcacatctttattcagcagcagttcacgcatcggttcccagtcggtgatgaccagcgggtcaatcagcgaaacctggctgccgtcgaacagctggagcagaccgagctgcgggtagtaggtacgagtacggacaaattccgtatccagcgcgatggcggaaaccgcgcttgccgcgtcgcagacggcgcgaaggccatcgttggtggtgatcatctgatagttcaaatcatactctcttaacttgcgcccataaaaaacgccggcttagccggcgtctggcgattcactcttagctcaggctttattgtctactttagcacgggcttcgtcacgcagttctcgacgtaaaattttcccgacgttggatttcggcagctcatcgcgaaactccaccagcttcggcaccttgtagccggttagctggcgacggcagaaagcgatcagcatctcttccgtcagcgccggatctttcttgaccacgaaaatcttcaccgcttcaccgctgctgccggacggcacgccgaccgcggccacttcctgaaccccggcgtgctgcatcaccacatcttcgatttcattcggatagacattgaagcccgagacaagaatcatatcttttttgcgatcgacgatacgcaggaagccctcttcatccatcaccgcgatatcgccggtatgcagccagccgtccttgataatttcagcggtcgcgtccggacgctgccagtagcccagcatcacctgcggccctttcacgcacagctcccccggttctcccggcgcgacttcattatcgtcatcatccaccagcttcgcttcggtggagggcaccggcaggccgatactgccgctgtgataatcgatatcgtgcggattgacgcttaccagcggcgcgcactccgtcaggccatagccttccagcagatactgcccggtcagcttaacccagcgctccgccaccacctgctgtaccggcattccgccgccggcggagagatgcagtgaagagaaatcgagctgctgaaactctttgttattgagcagcgcgttaaacagggtgttgaccccggtcatcgcggtgaagggatatttcgccagctctttgaccaggcctggaatatcgcgcggattggtgatcagcaggttctgcccgcccagctctataaacagcagacagttcatggtcagggcaaaaatgtggtacagcggtagcgcggtaacaaccagctctttaccgcggtgcagcagcggcccgtaggtgccgttgacctgctcaaggttcgccagcatattacgatgagtcagcatcgcccccttcgccacgccggtggtcccgccggtgtactggagaaaagcgagatcctgagagacgatttccggcttaatgtactgcatacggtagccgtgctgcagcgcgctgcgaaacgagatggcgtccggcagatgatattttggcaccagccgtttgatgtacttcaccacaaagttaaccagcgtccctttcgccgtggaaagctgatcgcccatgcgggttaagatcacgtgcttgacctgggttttatcaaccaccttttcaagggtatgggcgaagttggaaacgatcacaatggcggcggcgccgctgtcgttgagctggtgctccagttcgcgcggggtgtagagcggattaacgttcaccacgatcatgccggcacgcaggataccaaacagcgccaccggatactgcagcaggttaggcatcatcagggcgacgcggtcgcctttttgcaggcctaacccttcctgtagataagcggcgaacgcccgactgcgctcctccagcttacggtaggtcatcacctcgcccatattgataaaggccggctgatcggcatagcggcggacggcgtgttcaaacagttcaaccagggattgatagcggtcagggtttatctccgcaggaacgtccgcgggataacggtttagccaaacctttttcactgcatcacctctgaaatagttattcgtcgtcatcacagcccctgatcaacaaacattttgttaacattatattaactcagcgtaccagtttattaattagccgttgtacaggttgcgaagcgcgtcactatttatttttcttatttgactgaaaacgaagaaacagcggaccagccgctgtttctttttgcttacaaagactacaaaatcattcggttacaacgtttctgacttcggcaggaccggggttataccagccccagccgccgtacccgtagccccacggacgcgggccgaacatccacgggtccatcatcggctgcggcggcatgaccacctgctggactacgttccagcgtttgtagccggtggcgttcatcagcatgaatttatacggcgtattgcccactttaccgtcgacgacgccgacgatcgggccaaccacggtaaccagctgtccgcgaaaatccaccgggtcgataaagccgttcacgtcggcaaaaatacgcccgcgcgacgcttcgcccagctccggacgcgcggcgtcgtcaagctgaacggtggcaatttccaggcgagttttaccctgctgattctgcacgctgacgaccttaccgccaaaacgcgcttcctgaccgacatacagctgcggcgcgttcatcacgcggactaaatcctgctgcggcgtcggggtggtgcccttaatggcatccggcaccgaagcgcacccgctcagcgcagcaacgactgctgccgcgactaaccaacgcactacccttttttgacccgccatgacgcgactccttccttcttctcagacatatagttactgagattcactcgcggccaggaagtttcttccacgccacttcattacgtaaataaactggctcagcgtgttcgacggccacggtttttcccgccgtaaacaggtggcaggccagcggcagcatatcctgcgcttcaggcagctgaatgtcgccatcgacgagcgttaaaccgcagtcgcgagccatatccggccacgcctgccagccggtgcccacggtggcccactcgccttccagccgctgaagccgctcgcgaaccgcttccggcttcagcaccgcctcgctctcttcgccgtgccagacgccctgctcatcgcgctgatattccgcccagtagacttcgcccattctggcgtcgatggccgccagcacgcgggtggcgccgtttttccgccacgcgccctgcgccatggtcgccagcgtagatacgccgatcatcggcagcccggcccccagcgccagcccctgcgcgataccgatgccgatacgcacgccggtgaagctccccggcccgcggccaaaggccagcgcatcaagctcggtcaatagcgttccgctttcattgaggacatcctgcaccaggggcaggatacgttgggtatgttcacgggggcagatttcaaaatgagcactgagggtgccatcattccacagcgccgcggagcaggcctccgtggcggtatcgatagctaaaattcgcatgggttgtcgcgctctcgctctagcagattgacaaaatggcgcgcagcttaccacactttgcgccggattacctcgccggcggcaccgcaagaaaacgcaccgcccggcggatatcgcgcgtgcgcggcgcaggcggaaggctagcgaggaagaccgcgccgtagggacgcatcaccagacggttgtcgcagataaccagtaccccgcgatcgtcgatgtcgcgaatcaggcgccccaccccctgtttaagggtaatcaccgcgtccggtagctggacctcgtcaaaaggatcgccgccgcgcaggcgacaatcttccatccgcgctttgagtagcggatcgtccggcgaggtgaacggcagcttgtcgataatcaccagcgaaagcgcatcgccgcgcacgtccaccccttcccagaagctgctggtcgccaccagcagcgcatttccggcgctgacgaactgctgtaaaagctgacctttgctggtttctccctgcaggagcaccggcagcgtcatggtggcgcggaactgttccgccagatcgcgcatcatggcgtgcgaggtgcagagcataaagcagcgcccgtcgttggcctcaatcagcggtttgagcatcgccgccagatggcgcgccgcgccgggctggttcggcaaaggtaaattgcgcggtacgcacagcagcgcctgatgggcataatcaaaggggctgggcagcagcagcgtttgcgcttcgccaatccccaggcgatcggtaaagtggtgcaaatcgtcattgaccgagagcgtcgccgaggtaaaaatccagctccccgatttttgcgccatcacctctttaaacttatccgccaccgtcagcggagtcagcgccagagtaaaattacgcgaagtgcactcataccagtagctaaagccgggctggttggtctctttgagccgcttcaggcggccgcggtagacggtggcccgctcaaaggcggcgtcgagcagcgccgagcgccccagcgacagctttgccacgtcgtaacagagttcgagcgcatcatcaagcagcagcagcgcgcgctgaatgttgttatccgccagcagctcgcgcaggttgccgcgatagccgggttcccccagctgcaggcgaaaatcctgcgcgctctgggccagtcggtcggcgcacttctgcagctgctgggtgtctttgagttcggtgcgataagcaatggtgatatctttcgccaggtccagcagctggcggctggagagcgactggccgaagtactggctggcgatatccggtagctgatgcgcttcgtcgaagatcatcacttccgcttcgggaatcagttcggcaaagccgctctctttgaccaccatatcggcgaggaacagatggtggttgacgacgaccacgtcagcatccatcgcctttttccgcgccttcaccacaaaacagtctttatataacgggcagtcgctgccgaggcagttatcgttggtactggtgaccagcggccaggcctgggaatcttcggccacgctaacgcaggtgctgatatcgccatcgacggtctggttagaccacgaacgcagcagaatgacatcgctgagggtttgcaccggcaggtcgccgccggcgagcgcctgctgttccagccgctccaggcacaggtagttcgaacgccctttcagcagggccagcttaccggtgtacttcagcgctttagcgacagtgggtaaatcccgactgtagagctgatcctgtagcgctttcgagccggtggagataatgactttcttattggcgcggagcgcaggcgccaggtaggcgtaggttttcccggtcccggtccccgcctcaaccaccagcggacgggtttcttcaatcgcgctggcgacggcgaaagccatctgacgctgcggctcgcgtggtttaaatcccgcaatcgcgctggccagctggccgtctgctgcaaaatcgtcgatcacattaccccctggttatttggacagtgattatgtcagggtggagtcgttttcgccagtgcgggtagtgacgcaggtgaaacattatggcagtcttgccgcagcttaatgaaccggaacaaagaggaaataaacatgaccattacgcgtattgatgccgaagcccgctggtctgatgtggtgattcacaaccagacgctgtactacaccggcgtgccgtccaaccttgatgccgatgcctgcgcgcaaaccgccgataccctggcgcagattgacgccgtgctggagaaacagggcagcagcaagtcgcgtattcttgatgcgacgatttttcttgccgacggcgcagactttgcggcgatgaaccaggcctgggatgcgtgggtcgtcgccggtcatgccccggtgcgctgtacggtgcaggcgaagctgatgaatccgaagtacaaagtcgagattaaaatcatcgccgccgtgtaagacagccgtggccccgtagcccgggcacgcgcagcgccgcccgggaaaaagccgcgccaaagccgttatccggcgcattccccggatagcggcgtaaacgccttatccggctacatagcagccaggcagatcgggcacagcgccgtcgggaggcaagaagcattgttctatcagcccggacaccacatcagctgttccttcagctgcagcgtctcctgcggcacacatttcagcgcttcacgatagctggcagattgttttgcatagccccgcactgactgcagcagcacgcgcagcgcgctatcccacacgattccctgcaggtcgctgtagggccagagatccggttcccggataaacggcaccaggtaatcaatcccctgcttcacgcctcgcccatcgcggatggcgttccagcgatcgaactcaacgtgttcggcgtagcggttgagcagcagatgcgcctccagattaaacagcgagtagtggaacggaatggtacgttccagctccatcgtctgcctgccgtcctggtcaatctgcgccgccatccgctgggtgatcccctgctcgatgatccgcgccgccagccctttatcgccataaaatagcgcgttaaccgtccgctgagcgtcgtaccaggtgccgtggttgttgtgccagacgtactcagagtggccgatgtcgctgtagtacatccagtggttaaagtcgcggaaccactggtgcaggccgatgatatcgtcggtatcaagcacgctcgccgcgttaatcaaaccgatggtgtccaccaccatccacattaagcgggtatcaataagcccggtaccgcgaccggaaacaatccccgggatcgcctggccatagttcagatgcgggttcatccgcgtttccgcatcaaggaaccagcagcggatctgcgcagccgccgcctgcgcgtactggcgctgaccggtgaagtaccacgccagcccgagggtcaggcaccgttcgcacatgcggataatgcgcgaggtatccgtgtcgttgttctcacactgcggattaatatgcccgtcgcggcgaatatagggcagcccgttgggccgccgcgggtttggccaccagtaggtccccaggctgtagtaatcgtgcgcgtcgccgctcgccgggcgcagctttttatgtaccacgctttccggcgcttcccgacgcaggatatccgcctccgataccagcttgcttagcgccagctgcagcggcgagaagggctgcttcaggcccgcccgggcgttttccaggcaggtttcgtcaagggtgtacagcttcatcgccaccttaatttccctcccggcaggctatgcgctggccgctttgcgcatcgaacaggtgcacgccggcgagcttcggctgcagccagatcttatcgccctcttttacggccagacgctgtttgaacaccgatgtaaacgccccgccgccggtatcgcagaagagctgcatatccgagccggtgttctccaccgccgtcaccttcgccgccagcgcatcgtcccgcgcttcatgaaccacgttgacctgttcggggcgaatggcgtacaccacctgctggccgtcggtgacccgtaaaccggcgggcaaagccaacagggagccatctttcagacgcaggctggtggcgctaccgttcaagaccacgacgcccggcagctggttaatctccggcgagccgataaacccggcgacaaacagattcgccggccggtcgtacagttccagcggggtccccgcctgctctattcgcccgtcgcgcagcaccacaatcatctgccccatggtcatggcttcaatctgatcgtgggtgacgtacaccgaggtggttttcagccgacgatgcagttcgcggatctcgccgcgtacctgggttcgcagcttggcgtcaaggttggagagcggttcatcgaacaagaacacctgcggcttacgcacgatcgcccgccccatcgccacgcgctggcgctggccgccggagagatctttgggcaggcgctccagcagcggctccagccccagtagcgccgccgcttcattcaccttctggctgatttccgctttcggcagcttagccatcttcagggcaaagcccatattttcacgcacggtcatctgcgggtagagcgcatagctctggaacaccatcgcaatgtcgcgcagcttcggctccacctcggtaacgttacgctcgttgatatgcacttcgccgccggagatctcctccagcccggcaatcatgcgcagcagcgtggatttgccgcagccgctggggccaacgaggacgcagaactcgccgtccggaatcgtcagcgacacatctttaatgacgtgggcatccccgtatgatttgcgcacgctatttaatacaaccgatcccatcgttaaccccttatcctttgaccgcgccggacataatcccgcgattgaaatgtttttgcagacccagatagacgatgatgctgggcagcatcgccagcagcgtaatggcgataaaaatgttcggcgtgatgctctcatcggtacgcagcgtaccgaggatcaccggaatggtattcaggctgtcctggttgaccacaatcagcggcagcaggtactggtcccaaatcataataaagccgaaggtcaccaccgtgccgagcgccggttttaccagcggcagaatgacgtggaagaaaatctgccattcgttggcgccgtcaatccgcgccgcctcctccagctctttcggtatcgctgacataaattcggtcaggacaaagatggagaacgcccagccgacgaccggtaaaatcattccgagatagctgttgtagagcgaggcgtcgatcagcggcagccgccagttgataatcatgtacagcggaatggcgatgacctcttccggcagcatcatggtggacaaaatcaccaggctcaccagcgctacgccgcgaaacttcttccgcgccagggcgtacgccgccagcgcgctgaccgacacctgcagaacggtgccgaagaacaccaccagaatggagttcagcagatactgccagacgccgatatccatccacgcgaagatgaagttttccaacgagaactgatgcggccaggccagcagctcgcccggcttcacaggcgcgccgctgaatgccgtggcgacgatgccccagaacggcccgacaaagacaatcagcagcagcgcgtagatgcaccagcgccctgctgtatcccaacgtttgcttaacatcgcggctccttagtaacgggcgatacgttttttcagcgtcaaatgacagatggttaagattacggtgaaggtaaacagcaggaacgacaccgccgaagcgtagccatagtcaaactgctcaaagcccagcttgtagatgtgggtcatgaccatttccgtggcgttagaaggtcccccgccggtggtggcgtacacctcggcaaacacgcggaaaccgcgaatgaaggagagcatcagtaccaccgagagcgccgggatcatgccgggcagcgtgacgtagcgcaggcggttccaccagctggcgccgtcgacgttcgccgcatcgtataaatcgcggctgattcccgccaggccggcaataaagatcaccatgttgtagggcaccgctttccagatatgcagcagcatgatgacgcccagcgcctgatcggagctggcaagaaagccctggtcggcgacgccaaaccagctgaggatgtggttaaccacgccgttgggcgtcgggttaaacaaaatgcgccacatttcggcgacgatcgccgcgctggtaaccgccggtaaaaagatggcggttcgaataaagcgcagatggcgcgccgggccttccagcagcatggcgaggaaaaacgccaggatagccgcggcgaacatcgttaccaccacgtaaagcagggtattcaccaccgccgcgtgcagctctgcgtcggcaaaagcgcgggtgaagttatcgagccccacccactcgttgggctgattaaagttaaccttgtaaaagctcatcaccagaccctgaatcatcgggataaacttaaaccagctaaagataatcagcgcaggcgctaaaaacagccacgggatcagcgcccgcttacgctttgcgctcagccatccggtcgagtcaggcgaagcggcctgctttatcggcgaggacttcgtctcatgcagcgtcataacctatgtcctcagttagccagcacattttgttttttcagctcagcgttcaccttgccgtcgagcgtcttcagctcgccgggaatatcgctgccgcagtcggcaaaaatccggttaaaaccgtcggcggccacctgacgcaccggcgtccagttgggaatttgcggcacgtagcgtccctgttcattgtaaagtctggcgaaagtttcccagcgcgcgtcctgatacacggctttgacgtcgacgttcttattcaccggcagacgcactaccggaatatgctgactgcctttacccatgccgatctcctggccttccgcagagatcataaattcgataaattttcgcgccgcctctttctgtatgctgctcttcatcataaagaccgtggtgccctcggcgagggtggcttcgcctttcggccccgccaccgggatcacttcgaagttgtctttaccggggtctttatcgaacagcgcgatatggtacggcccgctgaagaacatgccgctttgcccggagcggaaggagggaataacgtcggcggtggtggcgttaatcgcgcccggctgggtgactttgtcgcacatcatggtgcgcataaaggtcatcgcctgagccacttccggcgtattgagcgaagcgctgaattttccgttctcttctttaacgaaatcaccacccgcctgccagataaagctgctcataaaccagctggcgtagccgcgcgtcgtggaagcgggaacgataaagccgtaggtatcatttttgccgttaccatcgggatcctgagtggtgaaggctttcgccagcgtctggatatcatcccagctcttaggctgcggtagccccagtttttcacgccagtctttacgcacgaagagcgcgaaagtttgcgccgaggtcggcacgccgtagtacttaccgtcgatatagcgggtactcttccatgccgtctggaatagctggtcgccgcccgcgatcgtctgcgggtcaatttcttcggcaatacccagctggatgaactgccccagcgacgccgcatcgttaaaaatcaaatcgggtaaggcgttgcccgccgtggcgcgcgccagccgctgttcaaagtcggtggtggcgttgaaatacgcgattttgataccggttttttcttcaaatttttccgcctcctgtttgtagatattcttcgagtcattgctggcgcggatccagacgttgagagtggtggcggcgtaactttgactaacgccgagcccgagtgcggtgagaagtaacagtgaacgtaatttacaggcagacatgatggcatatcctttattgtagggcacaaaggtaattaaattctcaattaatacacgaaaaagaatttgaatatcgctcaggcgttaatacagctggcgcaagaattatttccattcattagatagaaatgtatttcctaatacaaccgtataaaaaagaaattgcgtttcaaaaacaagaaaattgagacagatcacacatggaagtgacaaaaaaagtgacaaaaaataaataaccatataaatcaattgattataattttactaattttgttaatagattcaaaaaacagagaaaaacggcaaaaaacgtgatgtacgctgcattaaaagcgtcattatttatccaaaacgttaaacttgaaggacatcacaaaaaaaatcactttgtcttttacactgctcgccatcgaatatttaaatatattgtttttaattacaccgcctgtttcacgcgttctttaaatacgcgtcaggtataattctgttgttatcttttctcatatttgcagaagggttatcacgatgaactcaatacctcgccgaggtttgttaggcattgcgctgttttgttccggcctgagcgccgcctcgtatgccgccgagccatatacgctagacggaaaggatttagcctttagccggcagcagatcgccgcgaaagatccgctatttgttcaggcgcaagcggcgctgctaaaaaaagccgatctggcgctcaatcatccgctgttctcggtgatggataaaacgctggtcgccgccagcggcaataagcacgactactacagctttccgccttactggtggccgaatcccgataccaaagacgggcttccttatattcgcaaagatgggcaaaccaaccctgacgccaatagcgacgccaccgataagaaccggctggtgaagatgagtaacgacgtgtcaacgctggcgctggcgtggtacttctctcacgacgaacgctacgcgcaaaaggcggcggcgcagttaaagacctggttcctcgatcccaaaacgcgcatgacccccaacctgcagcatgcccaggccattcccggcatcaataccggacgcggtatcggcattattgatagccgcgcgctggttgacgtcgttgacgccatcgccctgctgcaatcctccgatgcgctgagcgaaaacgacgttagcgcattgaagcagtggtttggtgactattatcactggatgaccaccagccagaacggctttgaagaagagaactggcataacaatcacggcagctatttcgatatgcaggccgccgccttcgccctgttcagcgggaaaaccgacgaggcgaaaaagcgcctgtacatcacccagctgcggcgtattgcgggacaatttgatattgaaggccgccagatggccgaactggagcgcacgcgcccgtggcactacagcaattttaaccttgaagcctacaaccgcctgggaaggctcggcgagaaggcgggcgtcgatatctggaacttcaccctcgacgaccatagcctgcgcaaaggctatcaatacatcgccgggtttattaacagcgatacgccgtggccctggaaggacctggataaaatggatgacaagaaagcgctgcgcaatatcgccaccgccgcgcacgcctggccggaagatccgctgttccgtgacaaagcgcagtggctgcgggcgaaataccccgacgatatcactacgctcatcgccccgctttccgcatcgtcagaggtcagggataaccgctaatgaaacaattctccgggctctggcccgacattgtcggacgtgcagccgcgaatagcggactgcttgaacggctggtgaaggatgctcagccggtattagatgcagcggttcgcattccgcagtcagggatcgccagctggaatctctactacttttgtccgcgccacggcgtgcgcctggcgtggcgggcggatacgccccaccagcatgcctgcccggtcgatggggaaatatttagcggtgaaccgtgggatggcgcatggtggcgcgagatgaatggccgtaacgccagcgcctgtcagcagcttggcctgttatggcggctgaccggcgaaacggcgtatcgcgataaagttcgcacgctgctgatgggctacgcggatgtctatcccggctatgagatccacggcgatattcccaacaacggaccgggcaagatgaacgcccagacgctgtgcgaagccaactgcattctggaaatggcgctgggttatgacttcattcgcgacagcctggcgcccggcgagcagcggcacatcagtgaaaacctgctgcgctgcgcggcagcgtttttgcgcaaccatcgtagtccgcagatccataaccatgaggttaaaatcagcgcggcgcttggcgtactgggtttcatcctcgaagatgagacgctgctggagtttgccgtgaaccaaccgtacggcctgcgctggcagctggaaaatggcctgctggcggaggggctatggtttgaaggctccgttcactatcactactacgcgctgcagggctttctggcgtttgagaagctggcgcgcggcacccgctggagcctgctggacggcccgtggtatcaggcgatgctgacgttcccgctgtcgctgctgctgccggacggcaccttcccgcggcttaatgactgcctcgccgggcaggagaagctcaaccatcgggatctttacgagttcgcctggtttatctggcgtgacccgcagtacgccgcggtgctgcagtttaccgaaacgacgcccgacgagcgtgaaaccttactgtggcgcgaacaccccctgccggaaacgcccctgccgctgatcccgcagcagtcgctgtttgcgcccggcgccggcctgacgttatggcggcgaccgcagcaggcgctgctgattaagcacagcccctggggcggcgagcacgaccattacgacaggctggggctgatgctctggcatcgcgacggctggctgctcacggatatgggcaccaccggctacggtgcgaaaatgcactatgactattacaaaaacagcgccacccacaatacgctttcggtcaatcagaccaaccagcctccggccaatccgcaggtgctaggctggcatatggatagcgactctctgtggctggatagcgaggttgactgggggaagccgccgccggagctcaacagccatagccgcgtagagtgggacgcggcggcctggcgaggcgtgcgctttcgccgtcgcctgctgtggcttgaagaggtactgatcgatctctctacggtggaaaatccgcatcgccagcagcttgactggacactgcacctggcggcgcgggcgctggaccagagcggtacgccgcagcctttttcgctcagcggaccgctgcggcatatggccaatgccaccatgaccccgctgaacggctgccagccgcgccactttgcgcgcgacaaagacaccgttgcgctctggctttccggcgatggtgaactctggcaagggctggcgcccgataacccggcgattcgcgatctcagctatctggtgatgcgcaatcacctgccgcaggcgcgtttcgtctgcctgtgggatttcgctaaccgcgcgccgctgacggaggtgaatgtgcaccatacgccagccggtacgcacattaccttctggcgcggcgatcgcgtcacgcacgtgacgctgtacgacgatcccgggaaacgacctgatgcgatccttccgctcccggaaagcggcatctgatcgcaacgggggatttactcgtcttcatcctcaaagcgcgccacaatccgatccccggtatgcgaggcgcgcagttcatccgccactaaagcaatcgcctggccgctgctcatgccctgcgacatcagctcctgaattcgttccactgctttttgctgctgctcgtggctcagcgaaggtaaacctgcaaacatgactgactcctgctacattgtggggcgtaattatttcacgccgtccgcgcgtataccagcggacggtaacgatcaggattgaagaagacgatgttgtcccccgcaatgatttccctgccctggcgcccggatgccgctgaatactattttagcccgttaagttcccagccctgggcgatgctgctgcattccggttttgccgaacatgcgcataaccgttttgacatcattgtcgcccagccgcgcgccacgctggtgactcacggtcaactaaccaccctacgcgaaggggaaaccgtctcaacctccgccgccgatccgcttacgctggtgcatcagcagctggcgcactgtaacctgcagccgcagcctcatccgcatctgccgtttctcggcggcgcgctgggactgttcggctacgatttgggtcgtcgttttgaacatctgccggcgcgggccgacgcggatatcgaactgccggatatggcggtaggtatttatgactgggcgttaatcgtcgatcatcagcgccgggaggtatcgttattcagctatgacgatccgcaggcgcgcctggcgtggctggaagcacagactgcgcctgtcgctgcaacctttaccctgacctcagcgtggcgcgctaatatgagccgcgaggagtatggcgagaagttccgccagattcaggcttatctgcacagcggcgactgctatcaggtcaacctggcgcagcggtttacggcgagctatcgcggggatgagtggcaggccttccgtcagcttaaccgcgccaatcgcgcgccgttcagcgcctttattcgcctggatgaaggggccgtattaagcctgtcgcccgagcgttttattcagctccggcaaggcgacattcagacccggcccatcaaggggacattacccaggctggccgaccctgagcaggacgcgctgcaggcgcaaaagctggcgaactcgccaaaagaccgcgccgaaaatctgatgatcgtcgatttaatgcgtaacgatattggccgggttgcggaacccggtagcgttcgcgttcctgagctgtttgtggtggagcccttccccgccgtgcatcatctggtgagcaccgtcaccgccaggctgcccgctcatctgcacgccgccgacctgctgcgcgcggcctttcccggcggctcaatcaccggcgcgccgaaggtcagagcgatggagatcatcgatgaactggaaccgcagcggcgcaacgcgtggtgcggcagcatcggctatctcagcttctgcggcaacatggatagcagtatcactatccgtacgctgacggcctggcagggacacctctactgctccgccggcggcggaattgtggccgatagcgaagaggcagcggaatatcaggaaacttttgataaagttaatcgtatcctgcatcaactggagagctagaacatggcggacagcgccctcgaacttgacgatttcctctcgcgttttcagcttctgcgtccgcagcccacgcgccacgcgctcaaccagcgccaggccgcggtgctggtaccgatagttcgccgcccgcagccggggctgctgctgacccagcgttcgccgctgatgcgcaagcatgcgggtcaggtggccttccccggcggcgcggtagataacagcgatgcaacgctaatcgccgccgcgctgcgtgaagcgcaggaagaggtggcgatcccgccggagtcggttgaggtgattggcgttctgccgccggtcgatagcgtgaccggctttcaggttactccggtggtagggattatcccacccaatttgcactatcacgccagccaggatgaagtggccgcggtcttcgaaatgccgctggccgaagcgctgcgcctggggcgctaccatccgctggatatccatcgccgcggcaattcgcatcgcgtctggctctcctggtaccagcattattttgtctggggaatgaccgccggcattattcgcgagctggcgctacagataggcgcccgtccttagctatactcaaactgagacggcgttctcagcattagtaaatccgcggttatccattagtttaattcatgtgaatagataagctgatgacccggttccctcttacactatgcgcagtgattacatcgttgtcgcacccgcgacaaccctgtcaggagtgttagcgtgattagtatattcgacatgttcaaggtggggatcggcccctcatcttcccatactgtagggccgatgaaggccggtaaacagttcgtcgatgacctggtcgaaaagggattgcttaatgaagtgacgcgcgtggcggttgacgtctacggctcactgtcattaaccggcaaaggccaccatacggatatcgccattattatgggactggcgggcaatcagcccgatacggtcgatattgacgcgataccggcatttatccgcgacgttgaaacgcgcggtcgcctgctgctggcccaggggcagcatgaggtcgacttcccgcagaatgacggtatgcgttttcgcagcgacaacctgccgctgcatgaaaacggcatgaccattcatgcctgggctggcgagaaagaaatctacagcaaaacctattactccatcggcggcggttttatcgtcgatgaagagcatttcggcaaagagagcgccagcgaactcgccgtaccctatccgtttaaatccgctcaggaaatgctgggctactgtaaagagaccggcatgtcgctctccggcatggtgatgcagaatgagctggcgctgcacagcaaaaaagagattgaagactattttgccaatatctggcagaccatgcgcgcctgtatcgatcgcggaatgaataccgaaggcgttctgcccggcccgctgcgcgtgcctcgtcgcgcctcggcgctgcggcggatgctggttgccagcgataaactctcccacgatccgatgaacgtggtggactgggtcaacatgttcgcgctggcggtcaacgaagaaaacgccgccggtggccgcgtggtgacggcaccgacgaacggcgcctgcggcatcgtaccggcggtgctggcttactacgaccactttatcgagtccgtcagcccggatatctatattcgttacttcctggcgtcaggggctatcggcacgctgtataaaatgaacgcgtccatttccggcgcggaggtgggctgtcagggcgaagtgggcgtggcctgctcgatggccgctgcgggcctggcggaaatccttggcgccagccccgagcaggtctgcgtggcggcggaaatcggcatggagcacaacctcggcctcacctgcgacccggtggccggccaggtacaggtgccgtgcatcgaacgtaacgccattgcctccgtcaaagcgatcaacgccagccggatggccatgcgccgcaccagcgagccgcgcgtctcgctcgataaagtcattgagaccatgtacgagaccggtaaagacatgaacgccaaataccgggaaacctcgcgcggcggcctggcgattaaagttcagtgcgactaatccgtgtcctacagaatgcgcccccgggcgcattcttctttttccacgctatattattatctgcgcccactacacttgctctataacggctgttactctcattaacacttttagccgacagggcgtcgcgcatgcagactgcacaaaaagttatcacaacctaccgcaggaaacgtatcctggtttgcttgctggtcgcgctactgaccctgacgacaacattagtgatacgatttatttcgcagcgtagcttaaatcagcagcgcgtccagctcagcaccaataaaatggtggccgcaatggataatattctgcggcccctggcggcccagcacgccacgctgctgcaacttgtgaaccagccctgtcaggacgtccacctcacgttacgtaagctggcagcatcgctgcaaacggtacgttccatcgcgctggtccagtctgacctgctctattgctcgagtatttttggccaacgaaatattccggttcaccagttacagccggcgctccccgccaaccacgccctgcttaccttcagctacgacgcatcgctgcttaaagggacgccggtacttatccagtggtatcccgcttcgcttagcggcgccgacggtgtgctgctggtgatcaatatcgagctgctgggcgagttaatttttaacgcaaaatcgccattaattaccggaattggcctcagcgttggcgataaaagctttattagcggttccgggctgattaaacaggaatccttgcctggcgagcaaatcatctaccgccagtcgtcgacgcagtttcccttcaccattaacgtcagcgggccgggcgcctcagcggtcgccctcaatgagctaccgggcgaactgccgctggcgctgataatcagcctgttaatgaccggcatcgcctggctggcgaccgcgggaagaatgagcttttcccgggaaattaatctcggtattgccgcccacgagttcacgctttggtgccagcccctgcaggacctgcgcacccgtcagtgctgcggcgtggaaatactgctgcggtggaataatccacgcagaggcgctatttcgccggaggtgtttatccccatagccgaaggttataatctgatcgttcccctcacccgctatgtcatctcccaaacggcccacaaattagccctttttccgcaggacacacattttcacatcagcatcaacgtcgccgcccgccatttcgccaacggcgaactgctgcgcgatctgcatcactactggtttagcgcccatccggtacagcagctggtggttgagctcaccgaacgcgacgtactccaggatggcgatcaccatatggccgaacatctccattttaagggagtaaagctggccatcgacgatttcggcaccggcaacagctccctttcctggctggaaaagctgcgtcctgacgtattgaagatcgataaatccttcaccagcgcaattgggattgatagcgtcaacgcaacggtgaccgacatgatcattgctctcgcccaccggctgaagattgtgacggtcgcggaaggggtagagacccgggatcaggaagagtatctgcgcggcaacggcgtcgatttattgcagggattttactacgcccggccgatgccggtagaggactttccgcagtggctggcggcggaaaagcatcgggagctgaacgcttaaaaatgcccggcggcccgagggccgacgggcatcaaccgttactcttcttcgtcgttatactgtcgcagcttgacgacccgtaccagatcgacgcgatagtcgttggcttcaacaatcgtgaactgcaaaggtgacagttcaagcacgtcgcccggacgcggaatatggccgttgacggcaatcaccaagccggcaaccgtggcaatatcttcgtcctcatcgaccagatcgtctacccccaacgcctgctgcaacgcatgcacgtcggttgaacctttcaccagccagccgtcgccgtcgatgacaatttccggcgtttcgtcagcgtccgggaactcgccggcaatcgcctccagtacgtccagcggcgtaaccagcccctgtacgacgccaaactcgttagtcacgatgacaaagctaccgcgggcgcggcgcagcacgcccagcagattgatcgggtccaaagtttccgggaccacaatcgccggcgaggcggaagccagagcggcaacgttgtcacccgcttccagcgccaccagcatctctttcgcccgcacgataccgatgatttcatccagctcgccgcggcagaccgggaacaggctgtgcggtgaagagagcagctgacggcgaatttcctcttcgctttgctcggcgtttacccagctaatttccccgcgcggggtcataatgctgcgcaacgaacgctgggccagggtcagcacgccgttaatcatgtagcgctcttcttccgcaaacgcgccttcggggatcggcacgacggacgcgctatcgctatcatgcgccgcggcgctttgcttacgcccgcccatcagacggaggatcgcatcggcagtgcgcgcgcgcagaggcagggtcgattgatgacgaataaagttacggcgcgcaatctggttaaagaactcgatggttatcgagaagccaatcgcggcgtacaggtaacctttcggtatatggaaaccaaaaccttcagccaccaggctcaggccgatcatcagcaggaagctcagacagagcactaccaccgtcggatgctggttgacaaaattagtcaacggcttcgaagccagcagcatcaccgccatcgcgatcaccaccgccgccatcatcaccggcaggtggttaaccatcccgaccgcggtaatcacggcgtccagcgagaacacggcgtccagtaccacgatttgtagtaccaccacccagaagctggcatagcctttaccatgaccggagtcatgctggcggttctccagccgttcatgcagttcggtggtcgccttaaacagcaggaatatccccccgagcagcatgatcaggtcgcgtcctgaaaacgagaaatcggcaacgctgaaaagcggtttcgtcagggtcaccatccacgaaataaccgacagcagacccaggcgcataaacagcgccagcgagaggccgatcaggcgcgccttgtcccgctgctttggcggcagcttgtcggcaaggatggcgataaacaccaggttgtcgatacccagtacgatttcaaggacgacaagcgtcagcaaaccggcccaaatagagggatccattaagaattccatgagcagctccagttaacggcaggcgtagtcatcgctgtgtcatgcacagacgagacacttgttgctggtgaaaagacgtagcaggtggcggcggcaaacgcgtgccggaaggtgaaaagacgtcggtgacggtccatatagcgggctatgccctatactcctgagtaattaaacggaacgtaaacatagcaaaatatagagcataattggaaaaaatttacctgtctttgcaatagctaagagtattttttgcgctgcaaaataattaccaacagatgcataattagcggagcttcatcacattaattattttttcactgtctaaaataattcgctgtagtaattactttatatcttacacccttactgaatcgattttgttcgcaagagtgattcaggatgtatcagaacagatgatgcattcacgattataaaggaggtagcaagtgacgattgctattgtaataggcacacatggttgggctgcagaacagctgttaaaaacggcagaaatgctgctgggcgaacaggaaaacgttggctggattgatttcgtccctggcgaaaacgcggaaacgttaatcgaaaagtacaacgctcagctggcaaagctggatacagcaaaaggcgtgttatttctcgtcgatacatggggaggcagcccgtttaacgcggccagccgcattgtcgtcgataaagaacattatgaagtcatcgcgggcgttaatattccgatgctggtcgaaacgctgatggcgcgtgacgacaacccgtcgttcgatgagctggttgccctggcggtagaaaccggtcgcgaaggcgttaaggcgctgaaagcgaagccggtggaaaaggccgcccctgctccggttcaggcggctgccccgaaagcggctgcgccattgaagccaatgggtccaaacgactacatggttatcgggcttgcgcgtatcgatgaccgtttaatccacggccaggtcgccactcgctggactaaagaaaccaacgtttcccgcattatcgtcgtcagcgacgaagttgcggcggataccgtacgtaaaacgctgctgactcaggttgctcctccgggcgttaccgcccacgttgtagacgtcgcgaaaatgatccgcgtctataacaaccctaaatacgcaggcgagcgcattatgctgctgttcactaacccaacggacgttgaacgcgtggttgaaggcggtgtgaaaatcaccagcgtcaacatcggcggcatggctttccgccagggtaaaacgcaggtgaacaacgccatttcggtcgatgagaaagatatcgaagcgttcaaaaagctgaatgcccgcggtatcgaactggaggcccgcaaagtttccaccgaccagaaactgaaaatgatggatctgatcgccaaggtgaaataagtcaccccgcggatcgcaacgcaattttcaacttaagacttaatcaacaggagaagtacaatggagattacctttcttcagattgtgctggtgttcatcgtcgcgtgtattgcgggtatggagtcggtacttgatgaatttcagttccaccgtcctctggtggcctgtacgctgattggcgccgttctcggggatatgaaaaccggtattattatcggtggtaccctggaaatgatcgccctgggctggatgaacatcggtgcggccgttgcgccggatgccgcccttgcttccatcatctctaccgttctggttatcgccggccatcaaagcatcggtgccggtatcgcgctggcaatcccgctggccgcggcaggccaggttctgaccattatcgttcgtaccatcaccgttgccttccagcacgcggcggataaggccgcggagaatggaaacctgacggccatatcctggctgcacgtttcatcgctgttcctgcaggccatgcgtatcgctatccctgccgttatcgtggcgatttccgtcggcaccagcgaagtacagggtatgctgaacgccattccagaagtggttaccggcggtctgaacatcgcgggcggcatgatcgtggtcgtcggttacgcgatggtcatcaatatgatgcgcgcaggctacctgatgccgttcttctacctgggctttgttaccgccgcgttcaccgatttcaacctggttgctctgggtgtaattggtaccgtgatggcggtgctctacatccagctgagcccgaaatacaaccgcgtagcgggtgcgcctgtgcaggctgctggtaataacgatctcgacaacgaactggactaacaggtgagcgaaatggttgatatgactaaaaataccaccgagaaaaaactgactcagagtgatattcgtggcgtgttcattcgttctaacctgttccagggttcatggaacttcgaacgtatgcaggcgctgggcttctgcttctccatggtgccggctattcgtcgcctgtatccggagaacaacgatgcgcgtaaacaggcgattaagcgtcaccttgagttctttaacacccatccctacgttgcggcgccggttctcggcgtaacgctggcgatggaagagcagcgtgctaacggcgcagagatcgacgatggtgctatcaacggtatcaaagttggtctgatgggcccgctggccggcgtgggcgaccctatcttctggggtaccgttcgtccggtgttcgccgcgctgggcgcaggtatcgccatgagcggcagtctgctcgggcctctgctgttctttatcctgtttaacgcggtgcgtctgctgacccgttattacggcgtagcgtacggttaccgtaaaggtatcgatatcgttaaagatatgggcggcggcttcctgcagaaactgaccgagggggcgtcaattctcggcctgtttgtcatgggggcattggttaacaagtggacgcacgtgaacatcccgctggtggtttccaccatcaccggtcaggatggccagacgcgcgtgaccaccgtgcagactatccttgaccagctgatgccgggcctggtgccgctgctgctgaccttcgcctgtatgtggctgctgcgcaagaaagttaacgccctgtggatcatcgttggcttcttcgtcatcggtatcgcgggctacgctgtcggcctgctgggccagtaatctacacgctgtgcgccgggggcttgcccccggcttttttatttggaggatggatgacaatcacggacctggtgttaatcctgtttattctcgttctgctcgcgtttgcgatttacgatcagttcatcatgccgcgccgcaatggccccgttttgctggctatccccctgctccgccgcaatcgcgtcgatggcattatcttcgtcggcctcattgctatcctgatttataacaatattgccagccagggcgaacttatcaccacctggctattatctgccctggccttgatggggttatatcttttctggatccgttcacccaaaatcatcttcaaaaaagaaggcttttttttcgccaatatctggatcgaatataagcgtattaaagagatgaatttatcggaagatggcgtgctggtcatgcaattagagcagcgtcgcctgctaattcgcgtacaaaatatcgacgacctggaaaaaatatacaaacttctcatttcaactcaatgagttacaaatatagcctgcgctatattttgtcattccccggcgaatggaatatagccgcggctatattccattcgtttaattcgccgatatttattaacgaattattcacttctaaatttaaatgaaaatcgttatcatttggttagcaaaataacctgactccgttattgttttatattctaaaattatgttaaggttgcgcccgtcgttggggagtagccaattttctgcctgccagaaaatgtacgtgtcaacatactcgttgcaaaacgtggcacgtacgggttgaagaagaacgtcttcaatcaggcgagaccatagacgcatcgctgctgtacgcggcgcctcatcttcaggatgggctgcgtatttttactgggggcggcgatgtgtcatatggattatccccggtcaggacgctctcatgaatgtatccgctacaattcttcttgccttcggcatgtccatggacgccttcgcggcctctattggcaaaggcgccactctccataaacctaaattttctgaagccctgcgcacgggtctcatctttggcgctatcgaaacgctcacgccgctggtcggttggggaatggggatgcttgccagccagttcgttctcgagtggaaccactggattgcctttgtgctgctggtgtttctcggcggtcgaatggttatcgaagggtttcgcggcggcaacgacgacgactgcgaaactccgcgacgccacggtttctggctgctggtgaccaccgcattcgctaccagccttgacgccatggccgtcggcgttggcctggcgtttctgcaggtcaacattatcgccaccgcgctggctatcggctgcgccacgctgataatgtcgacgctcggtatgatggtgggacgttttatcggcccgctgctcggcaaacgggcggaaatcctcggcggtatcgtgctgattggcatcggcgcccagatcctctggagccatttcgccggctgatcctcaggcgtcgcgctgccagcagtgaatggcaaaatcggtctggcagccgaatcccacctgttgacgcagcgcttcccgaaccggcggcttagcccgccacgcaaacggcgtcatttgcagtaaagcttccgcctcgctgccgttaagctgcatcggataggccagctgctgctggtgacgtagcgtaaaccctgccatctcttccgcgttttgctcgtgcaaacgcacttcgtcgtatatcaaccctttcagctccatcaggtgacgaggccccggcgtcgcggtgatgacccagccgccggggcggacaacgcgcgccagctcaacggcattgcagggggcgtaaatacgtactatcgcatccaggcttgcatcctcaaacggtaaacgctggctggaggcgacgcaaaagttgacctgcgggtaccgttttgccgccgcgcggatagcggatttcgacacgtccagaccccagctgcggctggcgatggcggcaaaagcgtgcgtgtagtagccttccccgcagccgatgtccagtaaatcggtcggagcgaaagtgtgcagataagcgcagatcgcgtcgcgaagcggctgataatgacccgcatcgagaaacgcccgccgggcctgcatcatttcagcgctgtcgcccggatcgcgggagcgcttaaactgcaccggcagtaaattgacgtacccttccttcgccagatcgaactgatgccgctgcgggcagataaagctattatcgcggcgctcaagcggcgcgtggcaaagtgggcaactgtaagacatggcaactccggtgtgctgaaagggcgaaagtgtagcgctattcgcccctccaggccaccgttacagcgcaggcggcagcacgccgtcatgatgcatgacgatcaggttttcagaaccctgcggcatcccatctggcatcacgttttccaggcgcaggacatcgcccatgatctggctgaataccggcgccgacactgctccaccgtaatacgaaccgttgctggggtcgttcatcaccactaccagcgcaaattttgggttactggcgggcgccacccctgcggtataggccacgtatttgtcgatatatttcccgtcagggccaattttcttggcggtaccggtttttaccgccacccgatagtcgcgcaccgccgctttggtgcccccgccgcccggcaaagcaacgctctccatcatatgttcgacttcatgcacaatctgctccggcatcactcgggtgcccatgaccggcggatcgatacgcgtgatcgatagcggacgctcaataccgtagctgccgatagttgcgtaaacgtgcgccagctgaagcggcgtaaccatcaggccgtaaccgaaggcgaatgtcgcccggtccagctgtccccagtagcgacgctgcggcatcagcccggcgctttcaccggttaatcccagaccggtagagtcgccgaaaccgaacgctttataggtatcgataagatgttgaatcggcatggccagcgacaaatgtgaaacgccggtatcgctggatttttgcagaatgccggtgagggacagctcagggtagtaaccgacgtcgcgaatacgatgaccgtcgagggtaaacggatgggtatccaccacgctatccggctgaacaatgccctgctggagcgcggtcatcagcaccagcggcttaaccgtcgaccccggctcgaaagtatcgctaatcgcgcgattgcggaaatcatccagcttcgcgtcatcgcgattgttagggttgaaatcggggtagctggccatcgacaggatttccccggtatcaattttaattaataccgccgcccctgattccgctttgttccagcgcacggcgttatccagcgcgtcctcggtcaccgtttgcagacgctcatcgatactgagctgcaaattgtgggccgggaccgccgggacttcggtgatattttcgatgacgttgccgtgccggtctttgcgcaccagacggcgcccgggctgaccggttagctgggcattaaagcttttctctaccccctcgatcccctgattatcgatattggtaaagcccagcagattagccgcaacgtgccccgcgggataaaaacgacgcgactcatcgcgcagattaatccccggcaggtgcagcttgtcgatccactccgcctgctccgggtttatctgacgcgccagatagagaaaacgcgcatgaggatgcgcctgcacgcgatgggcaagctcgctaaggttgaggtgtaaagcttgcgccatcgcctgccagcgcgggccatacccgacgccgccttttgcgagagttgtttgcggatcgatccagatggcgctcaccggcacgctaaccgccagcgggcggccctcgcgatcgctaatcatgccgcgctgcacgtcgataggctcttcgcgcaaggagcgcatatcttcttgtttaaccaaattgtcgggagagacaatttgcagccagcctacccgggccagcagcagacccatacagcaaagaatggccacgcataacaacccaaaccgtaaaggggtaaagttagcggctgacttaagtttgttcttttgcaccttagctccatcattattttgcaaccacctgatttaacagatatatacaaaacaggttgctaaacagtgctaataaggatgttgttttgcaacaaagcgcaacagagggaggaaaaatgacatgatttgcaataaagactaaaaagccccgcggctgcgaggctttcttacaagattcagtggtctaaatcagatagcagttacgttaactgcagctggacctttctggccgtcctgaatttcgaactcaacgttctggccttcagccagagttttgaagccgttaccctggatagcggagaagtgtacgaacacatctttgctgccatcagccggagtaatgaagccaaaacctttagactcgttgaaccacttaacttgacctttaatctttgccatttgcaaaattccttagactgttttcttcgcccgtggggcacttacatagataaaactgacacatgactgcatgaggcactaatataaggttcggcagagaagcggtattcaacgacaacgtgtttactcaggacttctttactgaaaatgccacacataaacagaactgtacctcgtttaacccgaaaggtgttatcacatactacgtaaataatggcaagccatttttagacggctctcgatcgctcgcacaaattataagggaatcatttgatcacctgcacatttatgcgactttgcttcctctggcttatccttctccctccgcgctggcgccgctgagacggccccctgcctgggagtttatccgccattgctcaatgacttcagcttgccgggccccgcgtagagccaaactgccaattttagggggagtcagaaatcattgcataaagatgcatttaaaagctcatatcgatagttgaaaaattgctttaccggcccatggcataatatcgaagcgcgttaattgaagtacttaaaatattgtctatacttcacggcaataatgaacgcctgatgacagtcaggtctttcctgttcttttatttgatgaattaaacaaactaattaaagagagcataaacgcgccgcctccgcttgccggtgggcaggtttacggtcggaagagaatttatcgataaggatacgttatacaccgggggagatacaggcgcacaccgtcacgatgtacacctgacaatcagattagcgctctgcgaccagacgaatgaagtcgtcgtcgcctttccccttctcggcgatggaaggttctgcggcactctccttctctggctcattggcctcgcagagacggcgcagcagcgcgttttgccgcttttgctgatccagcagcgcctgcagcagcgctatctgctcattagcgcgcgagctggcgcgattaacaaaaaaccataacaacaggccgacaagcaacagcacaactgaaagcgccacggatgccaggcttacaatcccaggatttagtaactcactcatttcaccacctcaaagagaaggcgtttattctaccacccgcgcggcagaagaaaatcagtcatattaaaaatgtcttaccagggaataaatttattgatagtgcagatgccgctgaagaactgtacatcctgatcgcacattacgttaagcatctgagtccatagcagtaaacaacctgcgatgatgactatcagcaaaacccagcgtaattttttcactccacactccgcatcagtaccagatgtcgccaggataacatgaccttcttaaaccgcggctaactgtaatacgaaaggcaagtttaggaatcatagacttgtttcaaacgatgttcatgccagaatggacgcaaggataatacaaataatgaggcaacaatgcgattgatcattcgtaccattgtggtgctggctatcttgtggattggcgtattattaagcggctacggcgtattaatgggcagcagtgagaatgccggggggctgggattgcagtgtaaatatctcacggctcgcggcatcagtaccgcacaatatgttcattccagcagcggtattatcggcattaccgattgccctatcctgcgaaaaagcgccacggtagtcgataacggctagtcacgatcgggctacagacgctgtagcccgatttacgcacaaggtcagaacggataatcgttgtagcccatctgttctgaaattttacgcgccgccgtgtgcagcatcgccacgtactcgttcaggcgctcctccgagaaacgcagcgtcgggaaagagatactcaggcccgcgataaccacgccgaagcggtcgaaaaccggaaccccgatgcagcgcagcccctcttcctgctcttcgttatcttcgccatacccctgctcgcggaccttatcgagaaccgccagcagcgcttcggtgctggtgatagttctgtcggtgctgcgtttgtactccaccccttccagaatctgctcaacctcggcacgatcgcgccaggccagcagcactttaccgatcgcggtgctgtacagcgggttacgacgcccgatgcgcgaatacatgcgcaaattgtacattgagtcgattttgtggatgtaaacaatactgtcttcatccagggcgcccaggtggacggtctctttcgtcaggcgtgaaagctcgcgcatctgaatatcagcgctgcgcaccaaatcaacgttctgcaaagcccgcgcgccaagttcgaagagtttcagggtcagagaatatttctcggattcgccttcctgagctacgtatcccagcgatttcatggtctgcaaaaagcgataaacggtgctttttgacatcatgacgcgctgggacagttcggtaatgccaatttcacgctcttcgccaagcgcctgcagaatgccaaaaaccttcaataccgaagagacagaatctggctgtttatccaaatctgcaactgccatttatcacctcatcgcaactgttttataaaaattagaaccggtttttattataaattcgcatcccgttacccgcaatcgttcttctgccgattcgttacaaatctgcgacatgccgctgaataatcaatgctaaaattattaaccagttaatagttcccgataagatacagacttcacatggataaaaacatctccgatgggctgcctttaccgcagcgttacggcgccattctgaccattgtattaggcctggcgatggcggtgctggacggcgctatcgccaacgtcgccctgccgaccatcgccagcgatttaaacgcatccccggcctcttcaatctggatagtcaatgcctaccaaatcgctatcgttatcgcgctgctgccgctctctttcctcggcgatatggtcggctaccggcgtatttataaaatcggcctggtgctttttacctttacctcactggcctgcgcgctctccagaagcctggaaatgctgaccctggcgcgcgtggcgcaggggctcggcggcgcggcgctgatgagcgtgaacactgcgctgattcgcctgatttatcctcagcgctttctcggccgcgggatggggatcaactctttcgtggtggccgtctcctccgcggcggggccgaccatcgccgccgcgattctctcaatggcctcatggcaatggctgtttctgattaacgttccgctggggattatttcactgcttctcgcgatgcgctatctgccagctaacaccggccgcagcaaggttacccgcttcgacctgccgagcgccatcatgaatgccctcacttttggcttactgattaccgccctcggcgggttcgctcagggccagtcaggcgcgctggttgcggcggaggttatggccatgctggttgtcgggttcttttttgtccgccgccagctcaaaatgccggtccccctgctgccggttgacctgctgcgcattccgctattctctctgtcaatttgtacgtcgatatgctctttttgcgcccagatgctggcgatggtttcgctgccgttcttcctgcagtcaatgatggggcgtagcgaggtggaaaccggtctgctcctgacgccgtggccgctggccactatggtgatggcgccgctggcgggatatttgattgagaaagttcacgccgggctgctgggcgcgatgggtctaatcatcatggcctgcggcctgttcggcctggctttactgccctccgcgccgtcggacctggatattatctggcgaatggcgctctgcggcgcgggctttggtctgttccagtcccccaacaatcacaccatcgtctcgtcagcgccggctcatcgcagcggcggcgcaagcggcatgctggggaccgcgcgcctgcttggacagagcactggcgccgcgctggtggcgctgctgtttaacctgctgggcgatagcggaacccacaccgcccttttgctggccggaacgtttgccgtcgtcgcggccgccgtcagcgggctacgcgtcacgcagccgcgcgtcaggctgtaacgcaaaaccggcataaaaaaatccgcagcccgaaggttgcggatttttgttttcagggccagacgcgacggttatttcaggtattcgccgctgcgcagggcttcaatacgtttatccagcggcgggtgagtcataaacagctcgctcatggatttcgctttgccgttaatgcagaacgccatcatgctgctggcctcctgcggctcatagctggttttcagacgctgcagcgcggcgatcattttctcacgccctaccagcttcgctgaaccggcgtccgcatggaactcgcggtagcgggagaaccacatggtgatgatgctggccagaataccaaataccagctccagcaccgtggctaccgcaaagtagatcagcgggttgccgttgctgctttcaccttcatcgcggttgccgccgaggaagcccgccgcaatctgcgcgataacgcgcgagataaagataacgaaggtgttcactaccccctggatcagcgtcatggtgaccatatcaccgttggcgatgtggctaatctcatgggcgataaccgcttccgcttcatcacggctcatgttctgcagcagcccggtactgaccgccaccagcgacgcatcgcggcgcgcgccggtcgcgaaggcgttaatatccggcgcatggtagatagcgacctgcggcatagcgatacccgcctggcgcgcctgctgcgcgacggtattcatcagccagcgctcggtttcgttacgcggctgctcaatgacttccccacccaccgatttcagcgccatccatttcgacatcagcagcgaaacgattgagccgccgaaaccaaacaacagggccatgatcagcagcccggtcatgctgcttgactgaattcccgtcaggctcagcaccagcccgaacaccaccatcactgccaggttggtcagcaggaaaagcgcgattcgcatcataattttcttttaacctcgatttaacaaaacgcactatgcgattacccacatggtatgggtagaacgccaattttcaaccatcaggccctgctaagtcacgagaaagacacaactttacattttgtagcatattgctgacgctgggcaaaagcgttgacattttgttgaaatcaggcaatgaacgttgggaaaggcgagaaagaaaaacgggcacaacttagtgtgcccgttgggggattatttactggccggaggctctaccgcaggccgatccttttcctcatgggccaggtcgagcgcaatatgaaccgtttcatcaagatacgggtcaggctcctggtaatccttcggcagatcttccagttttttcagtagcggcttgccttcgcgtttcaggcgatcgttaacgcgggccagacgaatcgcatcatcttcttcattctccttttcacgctgcgcgtaattcagggagacgatgttacgtttgtctttcatcgcgttatagcgagcaatgtccttcatgatgtactggaactcaggatccttggcgatacgggcatcgtggcgcttcagcagctcgggtccgaacggcgtcaggtcaccatacttcacgaaagttgccgcattgacgctatcccacggcagcgcgttatcttcatactgctcgccggtttcacgctcttcggttccggtcggcatcatgatgtctggcgtcacacccttgcgctgagtactgccgccgttaatacggtagaatttctggatggtgtactgtacggaccccagcgccggccagtcagggcgcagcatctgatcgtaaatgcggttcagcgaacgatactgctggacggtccccttgccaaaggtcggctcaccgacgatcagcgctcggccatagtcctgcatcgcggcggcgaaaatttcagaagccgaggcgctgaaacggtcgaccagcaccaccagcgggcctttgtagtacaccacgccgtcggtatcgctgtcttcacgcaccttaccgttattatcgcgaacctggacaaccgggccggatggaataaacaggccagaaagcgaaaccgcttcggtcagcgccccgccgccgttgctgcgcagatcgataacgatgctgctaacgttctgtttctccagtttctgcagctgaaccttgacgtcgtccgtcaggccaacatagaaacccggaatatccagcacgccaaccttctctttgccgacggttttgactgacatcttaaccgcgcggtcttcaagacgaatgcgttcgcgcgtgagggtcacaatccgcgttttcgcgcctttacccgccgggagaatttccagacgaaccttgctgcccttgggacctttaatcagcgccacgacatcatcaagacgccagccgatgacatcaaccatgcctttacccggctgcccaacgccaacgatacggtcgcccacgctgatggatttactcttcgccgcaggaccaccggccaccagtgagttgatcaccgtgtagtcgtcatccatctgcagtaccgcgccgataccttcgagagacaggctcatttcggtgttgaactgttcggtattgcgcggagagagatagttcgtatgcgggtcgatttcacgcgcaaaggcggtcatcgccagcgagaaaacgtcttcactattggtttgcgccagacggcgaatggcaaacttgtagcgacgggttagggtctcgcgaatctctttatcatctttgccagccagcttgaggctgagctgatcaaacttcaccttggcatcccacagcgcattcagctcggcctcatctttcggccagggagacttgctgcggtcaaggttgaagttgtcattgccggtaaagtccatcggacgttccagcactttcaatgcatattgataacgctcaaatcgacgcttctgcgccaggttatacaggtcgtaaaaaacgtccagcttcccgctgcgcagctcatcgccgatttgattctttttcgcggcaaactgggccacgtcgctggctaacagcacgttatggctgtagtcgagcaggttcaggtagcgatcgaaaatttttgccgaaaaggcattatcaagatcgaactgccggtagtgagagcgggtaaagcgcgatgtgacgcgctcgctcaccgtcgcgtgctgcggctcttctttcagcacggggatttgatcgatccgggtgatatcgtccacggcgaatgactggcctgcgattaccagcaggcccgccaacgcggtgagcttaaagaatttgttcatgcctggcccggcctccgtttcagaacaccaggtgttctgcgcgtacaatcattgacataccagaagtcagctgtacacgaacgccatctttggtgatttccaggacggtggcgtccattgcattattgcctgctttcaccttcagtgcctggccaacggtcaatacagacacatctgatacaggggtatgacgctcttcgcgcggcgctttggctgctgctgccgggcgaggtttacgctgctcagcgccgtctttacgacgcgcctgaggctgaggacgtggtttacgctcgcgacgtgccccctcttccggctggcctgctgcggcagcggcttcgcgttttttggcctgctgcgcttcgcgctgcgcctggacgcgggcttttgcttcttcaagctgctgacgggcatgagcgacgtgctgctcttccagttcgccgcacgggttgccgtcaaggtcaacgcggactgcgccaggcttaacgccgtacaggtagcgccagctcgaagtataaagacgcaaagcagcgcgaagttgggttttgctgagattcatctctccgccaacgcgctcaacgagatcctgaaaaataccgactttcagggggcgagcttcgccttcagcgctaaaacactgagggaaacgttcggccagaaacgcaatgacttctttactgctattcaacttaggttgattttccatgaaatttcctgattacaacggacgtagccaacaagccgcaggcatgaacaggcgtcattataatgacgtcatcggtaaatgctacgttatccgttgattatcctgcgacgcgggtgaatattttttgataatcagtcgcagaaatgagtttttccagatgcgcgaccagttctgccagtccctgctcatcttcagcggtgaagcgggaatgcgccgtgctatcgatatccaggacgccgatagtttgattgttcacccgtaacgggaagacaatttccgaattactggcggcgtcacaggcgatgtgcccatcaaacgcgtgaacatcctctacccgctgcacgcgattctgcgcgacggcagtcccgcatacgccgcgtccgaccggaatccgcacgcaggccagcttgccctggaacgggccaagcaccagcgtgtcaccttccagaagatagaaaccggcccagttcacgtcggtcagccgctcgaacagcagcgcgctggtatttgaaatcatcgccagaaaactggtttcgcctgccattaacgcctgaaaatcgcggttcaaatccgcgtagaattctgatttgttcattatttggtcgcttagttgtcttactaccttacacttacagcctaataaaataagctttaaatgcattcatgctcaagatgaattcattcctgagttaagatagagagatacactcatttctgtaagctataaatgccactaaaaacacccaggattacgccagcaaaaaaaatgatcgtctactcggtcagcgcccccgttgagcacgctcactatcagcgctgtccgcagtgcgacctgctgtttcgtttaccggtccttaaaaagaatcaaagcgcctggtgtccccgctgcaacgccaaagtgcgcgatggccgcgactggtcgcttacccggctgggcagcatggcaatcgcgatgctgctgctgatgccttttgcctggagcgaaccgctgctgcgtttgcatctgctgggcgtgcgtatcgacgctaacgtccttcagggcatctggcaaatgaccggccagggcgatccgctcacggcggcgatggtgctattttgcgcggtcgtggcgccggtgctgctggtggtctcaatcgcctatctgtggctgggcaacgtgctgggcatgaatctgcgcccgatactgctgatgctggagcggctcaaagagtgggtgatgctggatatttacctggtcggcatcggcgtcgcctccattaaggtgcaggattacgccttcctgcagccgggcatcgggcttatcgcctatatctccctcaccctgctcagtatcctgacgcttatccatatgaacgtggaggagctctgggagcgtttttacccccagcgcccggcgctgcggccggatgaaaacctgcaggtttgcctcggctgccattataccggccatcgcgattcgcgcggccgctgccgtcgctgccacactcccctgcgccacagacgccgccagagcctgcaaaagagctgggctgcgctgattgcgtcaatggttttcctgctgcctgccaacctgctgccgatctcgattatctacgtcaacggcgcgcgtcaggatgacaccatcctttccggcattatgtcgctggccagcagcaacgtcgctatcgccggcgtcgtgttcatcgccagtattctggtcccattcaccaaagtaattgtattgtttacgctgctggtcagcatacaattcaagtgtgaacaggggttacgtacccgcatcctgctactgcggctgattacctggatcggccgctggtctatgttggatctttttgtcatcgcattaaccatgtcgctgatcaaccgcgatcagctcctcgcgtttacgatggggcccgccgcggtctattttggcgccgcggtaatattaactatccttgctgttgaatggctggacagccgcttactttgggacgcacatgagtcaggaaacgcccgcttcgccgactgaagccaaaattaaaactaaacgccgtatctcgccattttggctgctgccggtcatcgcgctgctgattgccggctggctgatatggaccagctaccaggatcgcggtacgacgatcgttatcgacttccagtccgctaacggtatcgtccctggccgcacgcctatccgctatcagggggtagaagtcggtacggtggagaacatctcgctgagtaaagatctgagcaaaattgaggtttccgccagcgtcaagggcgatatgaaagatgcgctgcgcaaggagacgcagttctggctggtaacgccgaaggcttctctcgccggcgtgtccggcctggatgcgctggtgggcggtaactatatcggcatgatgcccggccagggcgagcccgaggatcactttgtcgccctcgatacccagccgaagtaccacatcaacaacggcgagctgatgattcatctcaagtcagcggacttgggttcgttaaccagcggctcgctggtctatttccgcaaaattccggtcggccgggtatatgactacgccattaatccgaacaatcagggcgtcaccattgatgtgctgatcgagcggcgtttcaccaacctggtgaaaaaagagagccgtttctggaacgtatccggcgtgaaggcggacgtcagcctgagcggagcgaaagtccagctggacagcctctcggcgctggtgaacggcgctatcgcctttgattccccggatgattctccacaggctcagcaaaacacggattatcacttatacgaagacctggcgcacagccagcgcggcgtggtggttaaactggatctcccggatggcgcaggcttaaaagcgggctctacgccgctgatgtaccagggcctggaggtcggccagctcagtaagctgaatctcaatgccgacgggaaagtgaccggcgaaatgaccgtcgacccgagcgtcgtcagcctgctgcgcgagaagacgctgattcagatgaagaagccaaaaatctcgctggataaccccagcgtcagcgccctgctgaccggcaccaccttcgagctggtccccggcgagggtgaaccccgcaaccagtttgcggtgctgcctgccgataaatccattctggaagagccggatgtcgcgaccgtcacgctcaccgcgccggaaagctacggcatcgacgccgggcagccgctgattctgcacggcgtgcagattggccaggttctggagcgcaagctgaacgccgatggcgtcacgttccaggtggcggtgatgccggagtaccgttctctggtacgcggcgatagcaaattcgtggtcaacagccgcatcgacgttaaagtcggcatcgatggcgtggagttcctcggggccagcgccagcgaatgggtcagcggcgggatccgcattatcccgggcgacaaaggggcgatgcaaagccgctatccgctgtacgcgaaccaggaaaaggcgctggaaaacagcatgagcgatctgccgaccaccacgcttacgctctcagccgagacgctgccggacgtgcaggcaggctccgtggtgctgtaccgtaaatttgcggtcggggaaatcatcaccgtgcagccgcgcaagaacgcctttgagatcaatatccatatcaagccggaatatcgccatctgctgaccagcaacagcgtgttctgggccgagggcggcgcgaaagtgcagcttaacggtagcggcctgacggtgcaggcatccccgctctcccgcgcgctgaagggcgcgattagctttgataacctcagcggcgccagcgctagcgcgcggatcgataacaaacgcgtgctgtatgcgtcagaaaccgccgcccgcgcggtgggtgggcagataaccctgcacgccttcgacgccggtaaaatcgccgaagggatgccaattcgctacctggggattgatattggccagatccagtcgctgaatttaattaccgcgaaaaacgaagtgcaggcgaaagcggttctttacccggaatacgtcaatacctttgcccgcgccgggacgcgtttctcggtaattacgccgcagatatccgcggcgggcgtcgaacatctggatacccttttccaggcctatatcaacgtcgagccgggacgcggtgcgccgcgccgtgatttcgaaattcaggaaaccacgatcagcgattcacgttatatcgacggcctgagcattatcgtcgaagtaccggaagcgggttcgctgggtatcggcacgccggtgctgttccgcgggctcgaagtcggcacggtgaccggtctgatgctcggttcgatgtcggatcgcgtgatggtacagctgcgtatcagcaagcgttatcagtatctggtgcgcaacaactcggtgttctggctggcttccggctatagcctcgactttggcctgattggcggggtggtgaaaaccggtacctttaatcagttcattcgcggcggcatcgcgtttgcgacgcctccgggtacgccgctggcgccgaaagcgcaggatggcaaacacttcctgctgctggagagcgaaccgaaagagtggcgcgaatggggcaccgccctgccgcgctaagcataacaggctccggtgtccgccgccggagcctttatggtaaactacgcccccttttttcgttgtggtgcgctccccgtggctcaaaacgctgtctatcttcctgaagaattcctcgctcaaatgcgtgcggcaatgccgacgcatctctcttttgacgactttatcgccgcctgccagcgcccgctgcggcgaagcattcgcgtcaatacgctgaaaatcacggtggctgattttttgcagctggtcgccccctaccgctggcagctcacgccggttccgtggtgcgaagagggtttctggatcgagcgtgaagatgaagacgacctgccgctgggcagcacggccgagcaccttagcgggctgttttacattcaggaagccagctccatgctgccggtcgccgcgctgtttgccaacggacagatgccgaagcgggtgatggacgtcgccgccgcgccgggttctaaaaccacgcaaatcgccgcccgcatgggtaatgaaggcggcattctggccaatgaatattccgccagccgggttaaagtcctgcacgccaacatcagccgctgtggaatcagcaacgtggcgctgacccatttcgatggtcgggtattcggcgccgcgctgccggaatgctttgacgcgatcctgctcgacgccccctgctccggcgaaggggtagtacgtaaagatcccgatgcgctgaaaaactggtcgccggaaagcaacgcggaaattgcggtgacccagcgcgagctgattgacagcgcgtttcacgcccttcgccccggcgggacgctggtttactccacctgtaccctgaaccggcaagaaaacgaagaggtggtcaacgggctgctggcgcgctatccgcaggcggtagaagtcgtgccgctcggttcactgttcccgcaggccagcgaagccctcaccgaggagggcttcctgcacgtcttcccgcagatttttgactgcgaagggttcttcgtcgcccgtttacgtaaaaccgcggccatcgatccgcttccggcgccgggttataaagtggggaaattccccttcacgccgcttaaaacccgcgaatccgccgccgtgattgccgccgccgccgccgtcggtttgcagtggaccgccgaccatacgctctggcagcgcgataaagaaatctggttattcccacaggcgctcgaagcgttattcggcaaagtgcgcttttcccgcatcggcatccggctcgccgaaacccataacaaaggctaccgctggcagcacgaagcggtgattgcgcttgccgcgccggccgctcccctggcgctgacggaggccgaagcggaagagtggtatcgcggtcgcgatatctatcctgaaacgctcccgcagaaggatgatgcgattgtcacctatcagggcgcgccgatcgggctggcgaaaaaagtcgggtcgcgtttaaaaaatagctatccccgcgaactggtgcgtgacggtaagctttttagcaaaaaagcgtgatggcgcgtcgaaaaacagcattttttcactggcgctttacgcccgtttgtctacgctgaaaaatggcggccttaactggtcgtaccacaactcagcagacaaacggggtgaatttatggccaaaactaacgtacgtatcggcgcgtttgagatagacgacgccgaactgcacggcgaacagcagggagagcgaacgttaagcatcccctgcaaatccgatccggatttatgtatgcagcttgatgcatgggacgcggacaccagcgtacccgccatacttgatggtgaacattccgtcctctaccgtaagcactacgatcgccagtccgatgcctgggtcatgcgcctcgcctgactcaattgaacccgtcgcctgagacgggttatttatttccccgcttctccgtcatctcctacacttaacgctatgtttttcaggatatgaggctcggatgtttgccttagtgctgtttatttgttacctggacggcggctgtgaagatatcgttgtcgatgtttacgataacgagcggcagtgcacaacggccatggacgatcagcggatacgccacggcggctgctttccggtagaagattttatcgatagtttctggcttcccgcccgagaatacagcgatttttagcctgccagctgtagcgccaccagggttagctctccaccaaacacggcccccgtatcgatatagtgctggttatcgctgtcgtagcgtcgtttcagcggcgtatggccgaaccagaaatggtctgcgccggcaatcgcgccgtgacgcccggcgaggtggtcggtaagacgctgccgacgccacagcacctggtgctcatcgacagcgcgctgccagcgataaaccgcggcggggtaatcagcgtgggcaatcacgtgcacctgctcaccgctgtggagttcaataatcaacggcagtcggcggcagcgggcaataagcgccgtaaggcgttgcttttggctcgccgcacgctgcgtataccagtcgcctccgttcatctcccagagcctcatatcgccgtcggcaagcgcctccagcgccatctgttcatggtttccacgcaccgcgtaaacccagcgatagcgcagtaaatccagacactccgcgctttgtggcccacgatcgatcagatcgcccaccgaaagaagcagatcctggtaagggtcaaacttgcgctcacgaagggccgccatcaggcgtgcgaaacagccgtgcaggtcgcccaccagccagatattacgccagtcgcaaccgtaaatacgctgatacatatttcgtcctcctcgcataattataggaaaaccctgcggcttcaccgcccgtaaattggcacctcaatcgattttaaacgaaagccaaatatagtccggccgggcattaagctccccacgatatatccatagaatagaggctaaataacaccgaggtattcatcgtgacggataacagcctgcattcagccagcgtagttgagcgacgcccaaatctcattgccgatctggtgatgggccggatcacccccgcccccatctggcaacaacgtcattaccggcttaagtttttactgcgcacggcattattttatgcgccaacgcgcggcatgctggagagcctgtcagcgcgtgcggattttaatcagctgctcgccgctcaggtgacgctgccgggcaaagtccatcgccagtatttaacccgcgggttaaacgccagccagcgcgctcaggccattatcagccactatcagttcgttgattccctgggcgcctcgcgcctcgccggggccatgaccgcagcgaaagatgtgccgctgcttgagctgacaggcaaagacgacagccggtttacgctctccgcttcctcggcgggcaaagccgaacgcgagggcgaaacgacgctgtggctgcgcgatagcgatgagattgtgcttgccagcgcgacctttagcgtcacccgccagcaggagcaatggcagttgactatcggcggcctgcaggggccgcgcagcaccgttccgcacgaagtgattaaacgggcgacccgcgcctgttacggcctgttcccgaaacgcctgctgatggaatttatctggttaatggcggcgcgttgcaacattcatcacatttacggggtcagcgacagcggccacgtcttccgcgcgctgcgctatcggctgagtaaagggcgccattttcacgccagctataatgagttctggcactctatcgatggggtcgccgacggcgcctggcgctggcgcctgccgctgcagctggaaagaaagacgcttgagagcatcgccagtaagaaacgcgccgaatatcgtcgccgcttccagctgctggatgatatggccgctcagatggcgatactcatggattagctctcccgccgcttcgccaacgccgtttagcacaacggcgtttgcatcttcaacggcgctttagttactatcataacttcgttgtactccttgcggacggctagtgaagttatgagcaaaacagaattactcctgctggctatcctgttgattattttgaccgctgctctgtggtttatttttagcggacaaatatggtttctggtgagctttctggaaacatggctgtacccctcttttgtggcgccagaataaatcgttgcccattattttcacgccgccgttcgcccccttcgcctccctgacaataacccatagcgcggtcagaagaataaccgccaaaaaagtgaaaaaccgtctcttatctattatttcatttgtcatacaaatgtgtatactgggtcacttccgatgttggcccgtaaagttcacctgcactatgggcctgattttgtgcaggtgttttctcctcgcccttgctcaacggcgcctccagtgtctatacccgcctttttgtccagattttttgttgcaaactttgcgccagattgtgatttaagaaaaaatcgccctattttcacgccccttcaaaacacaattaaaaaacataacaccaacaattaattaacaaaaagagtttgcatccacataaaaggcataaacacagaacaacaatccaataaaaaacacataaccagccataaatacaaaattacacatatcttgcaggagtagttatacgttaaccaacaaaaccgcggcacttaatcggtgaccaacgtctatcgctacattgttgtttttcttcagcggctttccactaagaggttctctatgaacgtcacaacgatctcgcgcagtctcctgggcggcttactgagcgccatagtcattcttcaaccggcttctgcagcgggaaccttaagcggccagattggcgtccaggtgacgctcggcagcggatgcagcgtatcgaatgtccgcaatggcgaaaacaaccgctggggcaacattaatttcggctcctatggcgatttagccaactccattgatgcggagatcaccggcagcggcggcggaaacgccctaaccgtgacctgcaccgaggatcttgcctcgaccctgacgcttgacggcggccagtctggcgatgctgcgctgcgctatatgaaaaacgccggtggcacccagcagattgcctatcggctctattcggatgccgcccgcaataacgaaatcctgcctggcggcacgatacctatcattggcacagggaatccacaggcgattcctgtttttgcccgcattcgccccgaagaccagagcgtcaacgcgccgacagccgatgtgtatgacgacattgtcaccgcgaccttagcctggtaaccgcataaggaaaatgggcttcatgcttcgaccagagtggcttacattacttctgctttttacctcgggcgcccatgccgccgttgcccaaaagacgttcaaagtctccgcgcagataaccgcaggctgcgcgctgggcgccggggacggctcccaaacgacggacttcggcacgctgaattttggcaccctgtcatcgctttacagcaacgtggatgtcgcgagtaccgccggcgcaggttccatcatcgtgacctgcacgcccggcaccgctatttcaatcgccctcgactatggcgtcaacggcggctcagccactcagcgctacatgtcgaacggcaacagcagcacgctggcgtaccagctttatcaggacgccaaccgcgctaacgtttggggcagcagtacgctggccctgagcgtcgcatcctttccgagcaccacgcaaacctacacggtttatggccgcctttttgccacgaatggcttcccggcggtgggctcctataccgacacggtcaccgtcacgctgacctattagataattcacaggttaactatgattcgctgtagatttgcgccgtttatattcgctttattgcttccctcatccgtgctggccgccagctccgttctggtatggccgatatttcaaacgatcgaaagccacgaaacagggtctgaactgtggctggagaatcgcggcagcgcgccggttaatttgcagctgcgcgtgtttgcctgggatcaaaaagcgtcagcggacgtctacgccgatcagcgggatgttgtcgccagcccgccttttaccacggtagcgccggggcagcgccagctggtgcggctcatgcgcgtcgcccccatcgcaaacggcaaagagcactcctatcgcattgttatcgatgagatccctgccgcgcaacccgcggcgcagacggaacagaacgccgccgggctgaaaatgcgcatgcgctatgtcctgccgctgtttacctatgggcagggcgttacgccgctaaagaacgcgggttcagtcgaaccggtaagggccacgctgcgctggtcgctctcgcagcaaaataaccgccagacgctgtgcatcgaaaacagaggcaatcagcacgcgcgcctcagcgcggtttactgggcgaacgcgaacggtaaggggcgcattccccaggctaatggtcttctcggctacgttctggcgcagaaaaagagctgtttcccgagcgccggaaacgcttccgtgccgtcaggaatgcatctgttcgcgaaattaacggataacggtcaggcggtggaaattccggcgaatcgttaaaaatgagagatctgaaaaggacggcgtccggggggctgctggcgatggcgtcggtaacggcctgcgccgcgacctatgattccctgcctgcgcctgcggcatcctacggcgaaaagcaggagtacgagctgtacctcagcgtatcggtcaacggcaatattcttgccggcgccgttccggtaaaggtcaacgctggccactactggatcgcggccagcgtgttgcagcaagcgcatattcccctgcaaaccggcgacgcgctggttgatgtgacgacgctcccctcggtgaaagtggaatatgaccagccgggtcagatcctcaagctccaggttccggacaaatggctccccgagcagcacatcggggggaccacggaacaacctggccagaccgcgataagcagcccgggaattttatttaactacgacgcttacagcctcttttcatccggcggttcgcaaaccaccagcaccttcaccgaaacgcgccttttcggcccgccgggcgtcctttccaataacgccgtgattcggcaaaactggtcttcgacgggctacgagcagcagggctatatgcgctacgacaccctgtggaagtacagcgatagcgaccaaatgattagctaccaggccggggacgtggtcagtaacgccctgacgtggagcagttccgtgcgcatgggggggctacgcctgagccgcaacttcagcgttcgcccggatctggtgacatatccgctgcttaacttatccggcagcgcggcggttccttcgagcgtcgatctgtttatcaacggctataagagcagctctgcgcaaatcaatggcggcccctatacgctgaccaacgttccctggatcagcggcgccggcgaagccaccgtagtgaccaccgacgctctgggtcgccaggtctccaccagcatccctttttatgtctccaataccctgctgcgggaaggactgagcgattttgatttcaccctcggcgccctgcgcaacaactacggtatcaggagtgccgattatggcgccggcgcggtaagcgctatttatcgctacggattcaacaactggctcacgctttctacgcataccgaagaccgcgaagggttaaccaatgccggcattggcagcgatatcggcgtggggaatctgggcaccctcagcctgtcgggcagcgccagccgtggcgagggagacggaaaccagttcacctcgggttactcttactatggcagtagctggggagtgagctatcaacatatccgccgcagcgccagctacgacaacctcagcacctatgggtctaccgccacgctcagccgtcagtcagaccaggccacgctgagcctgagtccgtggggacgaaccctcggttcttttagcattggctactttgatatcaaagccgaggataattcgcgcacccggctgctgaacctctcctggagccgcggcctgtggctcagcagcagcctcagcctgagcgtcaaccgcgatctgcaggaaggtagctacgccagcatgctgcaggtcatcatccctttcgattcgcaaacctccgtccagctaagcggccagcgcgccagcgccggacaatggggagaaaatatcagcgtcagccgctctgctccggcagaaggcgggctgggctggaacctcgcccattcgatcggcggcgataactatagtcaggcggatctgacctggatcaaccgcgtgtcaacgctgagcggaggctactacgggtcgcgcgacgatcgtcacagctggtttgaggccgcgggctcggtggtgctgatggataacagtctgtttttcgcccggcaaattaacgacgcctttatcgtcgtctccaccggcaactacccgaatattgcggtgaattatgaaaatcgcaaagtcggcgtgaccgataaaaatggtcatctgctgatcccgtgggcgacggcgtggtatccggggaaagtcaccctcgatacgctaccgctgccaacggacaccgaagctctgacggtggagaaacgcatcgccgtgcgcgaaggcagcggagcgctggtcgatttcccggtgaaccgcgtgcgctcggcaaccctcgtcttcgtcgatgccagggggcaaccgctgccggtcggtacgccggtcgaggaggttaacagcaagcagcgcggcctggtgggctatgacggcgtggtctggttctcgcaccttggacgccacaacgaagtcaaaataaacgccggagagcttcgttgcagcattcagttcgaacttccgtcctcaacgccggttccgcagcggataggtccggtcagctgcccctcttaacagcggagataacgttgaaaagtattatcctcgtattcgcgatgctcttagcgctcgggcaagccagcaccgcgctggccgcctgcagcatcaaaaccagtgcgccagcgatcggcccggtggattcctttgcgctcaacagcgcgcctcagggcgtgatggccggcgcggggttttactgcaccccggaactggtggcgctcaactcaaccaatacgttaagcgccactctggcgtcggccaacaagagcaacggcgttccgcggctgcttaatggcgcgggcgatgccatcccttatagcgtctgttctgacgcctcgtgctcgccggcctatcaggacggcggcgtgattagctggtccagaacaacgctgctcgaactgctgggtttatttaactcaggcgatggcaccatgccgctctacttcagaaccacgccgggagccaacgtccccgccggtacctataccgatgtgttaaccatcacctgggtgtaccgattctgctacgtcgggctcgatctgctgggcattaagatatgtattccgaataacggaaccctgacctctacggtcaacgtgtcggtgaaggtgaccaatgtttgctatatcgacagcgcgccggacgtcgaatttgcctctgccgctcttccgtccggttttagccactacagcggccagcttgccatccgctgcactaaaaacgcggcctacaccgtcaacctcgccagcactaacgccagcgtcggcgactggcggcagatgagccagcccattgcgaaccaaccaaccgcctggctgcagtatcagttttaccagcccaacggcagcgcctggacggaaagcaacaatctcagcgtaaccggctccggcgccgcgcagtccgcgaactacaccctcaagattaacccgacccagagcaaccagcctgcgggaacctacagcgataccgtactggtgaccgtgagctactaaaacgttagcagacgattttttgtaaaagaaatgtttaggaaattattgttgtggtataagaaaaaagccccgaaaaaagcgactggggttttgcaatggaatctgcggtttgtgaaaaacagataaaaagagaccgaacacgattcctgtattcggtccagggaaatggctcttgggagagagccgtgcgctaaaagttggcattaatgcaggctaagtcgccttgccttataagaatagtttaccgtgtcaggttttccagtccgcgacaaaagtggacgaataattcgtatcaaaattgctgatgccaacaaaaaaccgccacgcccggtatcgggggatggcggtttttttcatgtaaatacagcgggatgcaggcggcgatcagcagagcttctgcgcgcgctcaataaagggcgccaggctcattttttgtcccggctgctgcggatcgtcaatctggatcacagaaatcggctgcgcgttggttttaccgtctttcatctgctgttcggcgatgtcgtttagcgggtactgcaccagggtactgggattaatggcgaacagcgcgttgcccggacggcaggtcagcatcacctcttcacggttaaacgcccagctctccttacccacctcaaagcggcttacggtaatcacctgcggtgccgccagcgcagcgccagaacttgccagtaacaacattgtcagaacgatttttttcatgatttaaccagtttattcagaaaggttcccaggtggcaaacaggctgacggcaaacagcgccagcgcccccagcgcaatttctatctgcgtagtgcgcacgatgagctgctccgctcgcgttccgcctgccgacatgcgtggcaccagaacataccggttcaccagcgcaattgccaccattgccgccaccagcgcacatttgaacaacagcatacgcccccagggcgaggcgctgataagtccgccctggatcagcagcgcatttaccacgccgctggcgatggcgccggcaaccgccagatgcccgtagcgcgaaaaacgcatcatggtgcagatggccgcctgccgccagcgaccgtgcgccaggcgaagacagtagataaacggcagcagaccgccaaaccagctggccacgcaaaacagatgaagcgcatggttggttcgctgcactatccccagccagccatcgttcattgcggcatgcccgacgccggccagcagcaacagctgagcgcaaaacagcaccagcagcaaacgtcccggtcgccggggcttcagccagaccaccgccagcgccacaaaggcgagtaaaatttgccatacccacacgccgccaaactgcgtcccggccaccgcctgccagatagccggctgccagacgtccggccagccgttgcccatcaagccgccctgcgccatcagcatcagcagcgccgacagcgcgcttgctgataataaatagcgcatcagcggatagaagcgctgcatcatcaaacgacgtagggccaccggcgcccaccatgcgccgtagaggacgcagccgaaagcgacgatcagcgaaatgaaatggataaagcgtaagctgacatagactccactcagcattggcttacttcacggtaaaggtgtattgccctttcgtcttgtggccatctacggagaccacgtgccagttaacggtatattcgcccggcgtcaacgcctgctcaaccggtaccgtcagctgagccttattgctgtcgctgcggacgggtttaccgagggtgatggtcttctgctgcggcccggtgagggttacgccgctaaactgcgtttcgatgccttcggagaagttcagcgtcagcgcctgcggtgaagcgttcaccacggtattggccgccggaagctgttgttgtagatgggcgtgggccgatgcgcctgctgcggtcaggcaaccggcgagaaacagagacagacgcagcgcgcgcccggcgatgattggcatagttgtcattcctttttgttatgtatgtagcacagagaataaccctgtataatggcgcagtcgagctaagcgtctgagacttgcctttttgccgcgtgcttagtactttttgcggcgttatcagaggagaaaccgatggaaaagaacctggctaaactatcccaggaggagatggacaaagtgaatgtcgatctcgccgcggcgggcgtcgcgtttaaagaacgctacaatatgccggtggtggctgatttagtcgaaagagaacagcccgagcatctgcgcggctggtttcgcgaacgtctgatcgcccatcgactggcctccgtttcgctctctcgcctgccctatgaaccgaaacagaaataattcccgtcccctgcggacatccacgttggcaagacccgcgcattctattacgctggtttctttggcctggagcgagccatgctgcgcgtaatcgatacagaaacctgcggattgcagggaggcattgttgaaatcgcctcggtagatattgtcgacggacacatcaccaatcccatgagccacctggttcgccccgaccggcctatcagcccgcaggcgatggcgattcaccatatcaccgaagagatggtcgccgataagccgtggatcgaggagattgtgccgctgtatatgggcagtccatggtatgtcgcccataacgccagctttgaccgccgggtgttgccggaaatgcagggcgagtggatctgcacgatgaagctggcgcgccgcctgtggccaggcatcaagtacagcaatatggggctgtataaatcgcgcaagctcagcgtcgcgacgccaccgggactgcatcatcaccgggcgctgtacgattgctatatcaccgcggccctgctgctcgatatcatcaacacctccggctggacgcctgaggagatggcgaccattaccggccgcccggcgctgctctccacctttaccttcggcaaataccgcggcaagccggtctcggaagtggcggaaaacgatcctggctatttacgctggctttttaataacctggatcgcatgagccccgagctgcgcctgacgctgaagcactatctcggggagtaatcggcgctatacctccgcctggcccggcagcgtcccctgcgccaggccaatcagaaacgcatactccagcgccacgccttcatagcttttgaagcggccggatttaccgccgtggccggaatccatatcggtacacagcagcagcaggttatcgtcggttttcagctcgcgcagttttgccacccattttgccggctcccagtattgtacctgcgaatcatgcaggcccgtggtgaccagcaaatgcggatacgcctgagcctgcacgccgtcgtacgggctgtagcttttcatatagcggtaataggcttcatcctgcggattcccccactcttcaaactcgccggtggtcagcggaatcgactcatcgagcatggtggtgaggacatcgacaaagggaacctgggccaccacgccgtggaagagctccggccgctggttcaccgcgacgcccatcagcataccgccggcgctgccgcccatgccgtagcaaaaacgcggatcgccgtagccctgcgccagcagcgcatcgcagacgtcgagataatcgttgaaggtatttttcttgcacaaaaactttccgtcttcgtaccactgctgtcccagctcgccgccgccgcgaatatgggcgatagcgaacacaaagccgcggtcgagcaggctcaggcggctggcgctgaaatccgcatccatgcttgcgccataggagccgtagccgtacaccagcagagggctggcacctttgcggaaatgttcgtgacggtagaccagcgagaccgggacttcgacgccgtcgcgggcgttgatccacagatgctcgctgcggtagtggctggcatcgaaccctttgacttcctgctgtttcagcacccgccgctcgccggtattcatatccagctcaaacagcgtatccggcgtcgtcatagaggagtagccgtagcgcaggcgggcggtttccggctccggattataggcaagccaggtcacataggccggatcgtcaaaggcaatgccctgggactctcttgtcttacgattgatctgacgcaggctggtcagcccgcgctggcgctcttccacaaccagccagtcggtaaacagggtaaatccttccagcatgacttcgtgccgcggcgcgatcagggtctcccactgctgctcatcgcgcagggtagtgcgataaaggccgaagttcttaccctcacggttagagcgcagatagaaagcgtgctgatagtgatcgaggctatattcatgatctttacgccgcggtagaaaacagaccggctcggcgtcggtcatttccgcattgagcagcagcacttcgctggtggtcgcgctggccagatagatcaccacaaactgctgggaagtcgttttgtgcacgctgacgtaaaaagtatcgtcctgctcttcatacaccagaacatccgcactggccggcgtccccagacggtggcgccagacctgatacggcagcagcgtggtgggatgtttgcgcacgtaccacagggtctgcgaatcgttactccaggcaaaagcaggcgagacgttctccagcacttccgcaaattgccggtcgtcgtttaagggaaagaagcgcaggctatactggcgtcgggagagatagtcttccgccaccgccatcaggctgttgtcgggcgaaacgcctaatccgccgagggtatagaattcgctgccggccgcacgctggttgccgtcaagcaggacgtcccattcatcccactcctctttgactaccggctggcgttgataaatcgcgtactcgcagcccggctcgtagacctgacggtagcgatagccatttttgctgtagggggctgacacttcgcgctgcggaatacggtcgataatctccttgagtaccctgtcctgcaggctactttgcgaagacatcacttttttgccgtactcattttcctggcgcagataatccagcacttccgcctgcgagcgatcgtcatcgcgcagccagtagtaattatcgattcgcgtgtcgccatgtaatgtcatggcatgggggatccgtttcgcttttggtggcatctgcttattcttctgcggcttgtattgagtactaaaattttcaggctgcttcaaagcagcctgaagggtgacgtgactacacaatatataagggtggcaaaagtcgccagcgatgcaagcgaaacgtgcggatttagagcgttacggcctgtttttgcgcctgaatatcccgttcgatatcttcacgcacttcctgcgggagcttcagcgcttcgccgagggcgttcagatagctgcgttccataaagtggtcaatatcaatgaccgcgcagctgatatagtaaacttcaagcgcctcttgctcgctgctgatgccctgcgccaggctctgcgggtcgaggggctgcgccagcgcccggtcaattaacacccgggcctggacgtcgacgtttgccgcacgcagctgctcttcgatatttgcccgctcgcgttcgtcaatatgtccatcgcttttggcggcgaagaccagcgccataatcagccgttcgctgcgggcgtcgagttcggccggtgcgggagatggcgcctgtgcgggcgcgacatcagccgatgcctgctgcgcgctggcgcgcatcttctgctgatatttattccataaaacgctgcccgcaaccgcgccgccgccgaccagcagcgcaccggtgccgtatttggctaacagcttgcgcgatgatttgctggcgaccagcagcccggccagcccgccgagcgcgcccggcaggagtaaatttttgccgcttgattgatcgtcagatgaagaagaccgcccctgctgacccagcagagactgcagttgattaagccagttagccatacatttcctcgttgcgcgataagcgataccaccagcctaaacgacgcgacgtcaggaaacgttatcggcagctaaagatgagcaaatgtcgcgccgggaagcgcgggagcctgccgccagaaccgctggcggcggcagcgtagctcaggccgctttcgctttgcgcggcttcgccggcgccggggcttcagattcgacgacgtcgtcggtcttgtcgccctcttctgcttctgcgcgatcggctggcgcctcggcggccacctcggcttccggcagcttaccggagcgcaaaatatggtttagggtgtctttacgttcggccagccacatcgccatgctatcgcgctgctcttcatcgagcgttagcgggcattcaaccagccagtcgttcagtacttccgccagatcgagcattttgtcataagcatcggcctcttttttgctggcaaaagacattttttcctcaccttcgcgaatcactacatatttaatttcaaccgccatgatgcagcctctcagtactgtatttttatacagtatatcaaatttcttccccgaactcaaatgacgcgcataaagacatgcgcaaacgttttcgtttataatgcggcgcatgtttttttactgcggaagagagttatgactgtattaggtacggcgctgcgccctgcggcaacaaaggtaatgctgttaggttccggcgaactgggtaaagaagtggccattgaatgccagcgcctgggaattgagaccatcgccgtcgatcgttaccctgacgctccggccatgcaggtcgcacaccgttcgcacgtcatcaatatgctgcacggcgaaaagttgcaggcgctgattgagcaggaaaagcctgactttatcgtgccggaaatcgaggccatcgccaccgatacactggtcgcgctggagcaggccgggcagaaagtcgtccccaccgcgcgcgcggcaaagctcaccatgaatcgcgaagggatccgccgcctggccgctgaagagctgaagctaccgacctccgcctaccgttttgccgacagcgaacccgccttccgcgaagccgtcgccgggataggcctgccgtgcatcgtcaagccggtaatgagctcatcgggtaaaggccagagctttattcgttccagcgaacagctggctgacgcctggcagtatgcgcagcagggcggccgcgccggagccggacgcgttatcgttgaaggcgtggtgaattttgatttcgagattacccttctcaccgtcagcgccgcggatggcgtacacttctgcgcgccggtcggtcatcgccaggaagatggcgactatcgtgaatcctggcagccgcagcagatgagcgcgctggcgctggaacgcgcgcaggaaatcgcccgtcaagtggtgctggcgctgggcggctacggcctgttcggcgtcgaactgttcgtctgcggtgatgaggtgatttttagcgaagtctcgccgcgcccgcacgacaccggtatggtcacgctgatttcacaggacttatccgagttcgccctgcacgttcgcgccttcctcggcctgccgattggcacgattcgccagtacggcccggcggcctcggcggtgatcctgccgcagctaaccagccagaacgtcactttcagcaatattcaggccgcggtcggcgcggggctgcagctgcgtctgttcggcaagccggaaattgacggttcgcgtcgtctgggcgtgacgctggcgatagccgataacgttgaggaagcggttgcgcgcgccaaagcggcggcggcggcggtcgtggtcgcaggataaaaaaaagcccggtcgcagaccgggcctctggtgagtgcgcgaagattacttcgcgccttctaccgcctcacgagccagtttggtgatacggtcgtaatcaccggcttccagcgcatccgccggcaccagccaggagccgccgatgcacagtacgctgttcagcgccagatagtcgcgatagttcgccggagagatgccgccagtcgggcagaagcgaatgtgcgcgaacgggccgccaatcgcctgcagcgctttcacgccgccgtttgcttccgccgggaagaatttgaactctttcaggccatactgcatacccagcatcagctcggatacggtgctgatccccgggatcagcggaatagtgccttcgccggtcgccgctttcagcagggattcggtcaggccagggctgatagcaaactgcgcgcccgcttcggtcacttctttcagctgctcaacgttagtgacggtaccggcaccgacaatcgcttccgggacttctttggcgatcgcgcggatagcgtccatcgcgcactcggtacgcagggtcacttccagtacgcgtacgccgcctgcaaccagcgctttcgccattggcacagcgtgttctagctttttcaccacgattaccggtactaccggaccggaggtgaggattgcttctgcagttgttttccagtttttcatcagattttctctcgccagatctataaatcgaatcgtcttaaaaattgatgcaggttgcgccctgttctgctccggagagtttctcacgcagcgcaccgaacatttcccggccggttcccacgcgcgaaccgctcaggtcaggaatatgcgcctgacgcgcggccagctctgcgtcatcgaccagcagcgttagctcgcccgtctggccgttgacgcggatgatatcgccatcgcgtaccttcgccagcaggcccccatcgtacgcttcgggcgtcacgtggatcgccgatggcactttgcctgatgcgccggagagacgaccatcggttaccagcgcaattttgaaacggcggtccaataatacaccaagtggcggcataagtttatgtaattctggcatgccgttcgcttttggcccctgatgacggacgacaaccacgcaatctttgtcgagcagccccgcttcaaaggcgggcagtacgtcatgctggctctcgaaaaccaccgcaggagcttcaataatctggttttcaaccggcacggcggaggttttcatgaccgcgcgtccgaggttaccgctcagcactttggtgccgccgtggcgagagaacggtttgtcaaacgtggcgataacctgttcgtccagcggcgcggtcgccccttcgcgccagtcaagttcgccgttattaagccagggctccatggtgtagcgagagaggccgaagccggccacggtgtgaacatcttcatgcagcaggccgcctttcatcagctcgcgcaccagcaccggcacgccgccagccgcctggaagtggttaatatccgccgggccgttcgggtagaggcgcgccagcagcggcaccacgtcagagagatcggagaaatcatcccagttaatgataatccctgccgcccgcgccatagccaccaggtgcatggtgtggttggtagagccgccggttgccagcagcgcgacaatcccgttgaccaccactttttcatcaaacattttgcccagcggcatccactcgttaccgttgccggtcaggcgggtcacctggcgggcggcggcggcggtcagcgcttcgcgcagcggcgcatccggatgcacgaatgacgatccgggcagctgcatccccataaactcaaccaccatctggttggtattggcggtaccgtagaaggtacaggtgccaggcgcatggtaagacgcggcttcggactccagcagcgccatacgatccactttgccttccgcatagagctgacgaatgcgtactttttctttattcgccaggccgctggccatcggcccggaaggaataaagatggacggcaggtggccgaacgacagcgcagccatcgccaggccggggacaattttatcgcagacgccgaggtagagcgcgccgtcaaacatgttgtgcgacaggccaatcgcggcggacatggcaatcacttcgcggctgagcagcgacagctccatcccgtcctgcccctgcgtcacgccatcgcacatcgccggaacgccgccggcgacctggcctaccgcgttcgcagagtgcagcgctttgcggataatttccggatagcgctcatagggctggtgggcggacagcatatcgttgtaggaggtaatgatggcgatgttattgcgcagcatgcttttcagcgaggctttgtcatccgcctggcaggcggcaaagccgtgggccaggttaccgcatgccagctgggcgcgatgaacggtgtcggttttggcctggttaatccgggcgaggtaggcttcgcgggtatcgcgcgagcgttcgatgatgcgatttgttacccgtaacatttcagaattcataaaggctcctcaaatttcatctgtccggccgcagcgctttagcggtacttttaggggtttagggcaccagtactggggctcaggggcaaaatatctgcaggcagtgtaataaaaaaagccccgggggtgaatcctccggggcttaaaagattaaaaattacgcgacttgctgcgtcagatcatgttaccggtaaaataaccctgacggaggagctggcgattactcaaactcgttccacgaacgaccatcgcgggtgatcatcgccacggaggcaaccggcccccaggtacccgcctgatacggtttcggcgaatcgcgatcggcagcccaggcttcagtgatggagtcgacccacttccacgcctcttccacttcatcacgacggacgaacagcgcctggataccgcgcatcgtttccagcagcaggcgctcgtaggcatccgccaggtgggtttgattaaaggtttccgagtagctcagatccagcttggtgatctgcaggttatgcttgtggtcaagtccgggaactttgttcagcacctggatatccaccccttcatccggctgcagacgaatggtcagcttattctgcggcagctcttgccaggtctctttgaacaggttcagctccggcgttttgaagtaaaccacgacttcggaacacttggtcggcagacgtttaccggtacgcaggtagaacggtacgcccgcccagcgccagttgtcgatatccacgcggatcgccacgaaggtttctgtatggctggacttgttggccccctcttcctcgaggtagcccggcacttttttgccctgggcaaaaccggcggtgtactggccgcgcaccgttttttcacgcacgttggtgcggtcaatgcggcgcagcgatttcagcaccttcactttttcatcgcggatgctatcggcagtcaaatctgacggcggggacatggcaatcatgcacagaatttgcagcaggtggttctggatcatgtcgcgcatctgcccggcctgatcgaagtagccccagcggccctcaatgcccacctcttccgccacggtgatctcgacgtgatcgatggtgcggctgtcccagttattgacgaacagcgagttggcaaagcgcagcgccagcaggttcagcaccgtctctttacccagatagtggtcgatacggtagacctggcactcttcaaagaactcacccacccgatcgttgatctcgcgggaggtttccagggaggtacccagcggtttctccatcaccacgcgggccggcttggcgttcagcttcgcttcacccagacctttgcaaatcgcgccaaaggtgctcggcggcatggcgaaatagttaatggtcacccgctctttttgatcgagcattttgcccagacgagtaaacgctttggtatcgttgacatcaaggttacaaaaatccagacgcccgctcagggtctcccacaaaccttcatcgattttctccttcatgaaggtttccatcgcttcacgcactaccttggtgtaagcgtctttgtcccagtcggcgcgaccgacgccgatgatgcgggtgtcagggtggatctggcccgctttttcaagctgatacagggaaggcagcaatttacgtcgcgccaggtcacccttcgcgccgaaaatgaccagatcgcatgcctgggccgtttgcgttaccgccatgtcattctccttagttgatagcccggtgcttatgccagactatagttgtatttgtaattttctttcactgcatcgtactgtgtttacgaatttcccgaaaccctcagcggccgttcccgctgctaaatcgcacagggtggaaaacagaggctgagattttgggcatgcggctaatattgttcgttgtttcgaccgattatcagttagtaaaatacgactctgatcatgtaatgaaaaaaaacaacatattttcaggtcattcctcaccgtttccgactacggaggggtatattcttgctataacgcctgatgatttcacccattaatgaaatcgcttccattgatgagcgcccgattacccatgaatatgctggaaaaaatccagtcccggctggaacaccttagcaaatctgaacgcaaagtggcggaagtcatccttgctacccccgcgcaggccattcattcaagtattgccgccctggcgctggaagccggcgtcagcgagcccacggttaaccgtttctgccgcagcctggaaacgcgcggtttcccggatttcaaactgcatcttgcacaaagcctggcgcacggtacgctctatgttaaccgcaacgtcgatgaagacgacagcgttgagtcctatacgggaaagatatttgagtcagccatggccagtttagatcaggtccatcattctctcgacatgtcggcgatcaatcgcgcggttgacctgctcacgcaggcgaagaaaatcgccttttttggcctgggctcttcggccgccgtcgcccacgacgcgatgaacaagtttttccgttttaacgtgccggtgatctattccgacgacatcgtcctgcaacgcatgagctgtatgaactgtaatgacgatgatgtggtggtgatcatctcgcataccggcaggactaaaagcctggtggagctggcgcagctggcccgcgaaaacgatgcgatggtgatcgcgattacctcccccggcacgccgctttcccgggaatcaacgctggcgattaccctggacgtaccggaagataccgatatctatatgccgatggtctcccgcttagcgcagctgacggtaattgatgtcctggcgaccggcttcaccctgcggcggggagcaaaattcagagataacttgaagagggtcaaggaagcgctcaaggaatcgcgctttgataaagagctcagcgtacacagcaatgaccaataaaagtagaaacaaagcactatcctattacaccgtcggtaatgttccggtatagcgactttgctcgtcggcgctaccgaatccatgttcacgcaacaccaaagttgtttcagtcaacggagtattacatgtccagaaggcttcgcagaaccaaaatcgtgactaccttaggcccggctaccgaccgcgataacaaccttgagaaggttattgccgcaggcgctaacgtggtacgtatgaacttctctcacggcaccgcggaggatcatcagatccgcgcggataaagtccgtgagattgcggcgaaactgggccgtcatgtcgcgattctcggtgacctacaggggccgaaaatccgcgtttccaccttcaaagaaggcaaaattttcctcaatatcggcgataaattcctcctcgacgcaaacctgggtaaaggcgaaggcgacaaagagaaagtcggcatcgactataaagggctgccggctgacgtggttccgggcgacattctgctgctggacgacggccgcgtacagctgaaggtcctggaagttcagggcatgaaggtgttcaccgaagtcaccgtcggcggaccgttgtccaataataaggggattaacaagctgggcggcggcctctctgccgaagcgctgacggagaaagacaaagcggacatcatcaccgccgccaaaattggcgtcgattacctggccgtctccttcccgcgctgcggcgaagacctgaactacgctcgtcgcctggcgcgcgatgccggctgcgatgccaaaatcgtcgccaaagtcgagcgcgcggaagcggtatgcgatcaggacgcgatggatgacgtgatcctcgcctccgacgttgtcatggtggcccgcggcgacctcggcgtggaaatcggcgatccggagctggtcggcatccagaaggcgctgatccgccgcgcccgtcagctgaaccgctcggtcattaccgcgacgcagatgatggagtcgatgatcaccaacccgatgccaacccgcgccgaagtcatggacgtggcgaacgccgtgctggacggcaccgacgccgtgatgctgtcggcagaaaccgccgcgggccagtatccgtctgagaccgttgccgcgatggcgcgcgtctgcctcggcgcggaaaaaatccccagcctcaacgtctccaagcaccgcctggacattcagttcgataacgtggaagaagccattgcgatgtccgccatgtacgcggcgaaccacctcaagggcgtcaccgctatcattactatgacggaatccggtcggaccgcgctgatgacttcccgcatcagctccggcctgccgattttcgcgctgtctcgccacgagcgcacgctgaacctgaccgcgctgtatcgcggcgtgaccccggtgcatttcgatagcgtcaatgacggcgtagccgctgcgcacgacgcggtaacgctgctgcgtgataaaggctatctggtgaccggcgacctggttatcgtcactcagggtgacgtgatgagcaccatcggtagcaccaacaccacccgcattctgaccgtcgagtaagcctctccacctacctgccagcgccgcagctggcaggtatttttttgcctcctcgcccgctaaactacgcaagccagctcaacaatagcgtggcggtaatcaccgtcgacgcgccgccgatacgggtggctatctgggcaaaaggcattaatcccattcggtttgatgccgagagaatggcaacgtctcccgtcccccccagcccgctgtggcagctggtgacgatggccgcttcgaccgggtacatattcagccgagaagcgataagaaagccgcttagcgccatcgcaatgacgattgagccgcaaaccaccacgtagccaaccgagaagaccgcgaccacgctttccagaggaacatacagcattcccaggcctatcatcagcggccaaaccagcgcggcggagacgaacttgtagcagctgtgcgcccccagctccatcgccgccgggataaccttcgcgtatttgcaaaataccgcggccagaatcatcagcaccggccccggaatatgcaccaccttttccagcagaccgccgacgataaaaaacgcgcaaatcattaataatccggcccccatcagttggaaatccgtgggctgcgcgcgctgattttgcgcaaagacgctgttatcttcatggctgcggatcagcattccgctgccggagagcgaaggacgtcgcgtccccatgcgcgccagaaaaccggcgcagatgatggcgaaaatgttgcccaccacggcagccggcgccagctgcgccacgtaaacgtcgggcgtttgcccgagaatggctgaataggccagcgatagaggcaggatcccttcaccgataccgccgccgatgatcggcacgataataaagaaaaaggtgtggtagaaactgtagccaaccaggctgcccaccagcaggccggttaagatcgccgccccggtccccaccaccagcgggacaaacatacgtaccattccctgaatcaggatggttctgttcatgcccagaatgctgccgacgaccaggcaggcgatgacaaaatagaggagattggcctctttcatcagcaagtgcacggtatcgagggtatgcgcttcgaacatgccgaaatagaccagcaccgacggcgtcatcaggcacaaaatggccgggccgccaacctccttgaggattggcaccatccggccaattttagccagcgcgaaccccagggtcatgattaccgccagaccgccaatcatgttcttcggcagcaggcctgcggtcgcggagatggcaacaattgcggctatcccgataaatagcgccaacggcacggcgccgacctcaatattggataaaagtcgtggcgcctgcccgctcggcagcgttttatctatcgggtggttgagtgagttattttccatatttttacctgaataatgatgtcacgtagggtatcgacgcaatataaaaagcgcgcaatcaaataaataaaaaagtgccaggcaaaataccaatgaaacaaaaaaacgttagcacaggacgttaacattaaaaataaaatccaggttttactgtcgtgctttgtgactaaagcataatatttattttaagtaatttaatttattatccggaaactaaagttaccggcatcggtatagttgaatagcagagagataaagtgatgattctgtccttttttctctatttgtaagtaaagtatttaaggcgaaattatttaaaccccagcgactgtgatgactatcaccttttaaatattatgggatcgctagattaaaaaaacacaacgtagccgataatatattttcaggacatcttatgccttcactgctcttagaatccctttttcccctggtgtttatcatgctgctcggatggctaagcggtaagctgggctatacccgccgcgaggatgcgtccgtactggccacggtggtcattcgtttcgcgcttcccttccatctttttatcggcgcactgaatactcatcccgataagataaaaaacttcacctttatggcggtgttagtcatcggtctgatggggtcatatatcctcacgctcctgatctcacgctatgtttttcgtcatgatattaaaaccagcgcgattcagtccctggtgtgcgcgttccccgacatggcctactttggcgctcccgtgcttgcggtgctgattggtccggagggttttctcggcgtgcttatcggtaacctggtgaccagcgtattgatgatccccctgaccatcatcctgattcgcatggatgacaagcgcggccgcgctgacgcggaacagcctaatccgctgcggcttatcctgcaaaacctgtttaaagccgtccgaaacccgattgtctggataccgatttccggggtactgctcagccttgccggagtacagctgccgcacatgctgagcatgcccattgagatggtgggaaaagtggcgggcggcctctccctgttcgcccttgggctgctattttacggcgaacgtcctacggtcaatattcaaacctgtaccaatatcagcatcaagaatctgctccagccggccatgatggccgtagccggcctcgccttcgggctcagccatagcctgatgcagcaggtcattatcatcggcgcgacgccttccgccattgcggcagggatgtttgccctgcgcagcgatacctatatcgagcccgcctcttcctctattttgctcggtaccgcagtgggcgtcgtcactgaaggattcatgatttatttaatctcttaatcactgaaataaagcccgaagaattccggcaattatttattatgatattcaggagtcatcaaatgttagccacagaaaccttatatacgccctataacggcgccgtgctgctggaaaacccgttattaaataaaggtctcgcgtttactgaaggtgaacggaccgcgtttaatcttcagggtctgctgccgcataatgtcgaaacgattgaagagcaaaccgcacgcgcgtgggggcagttttgccagtttaaacgggatatttcacgccatatctacctgcgaaatattcaggatactaacgagaccctattctataatctgctgcgcagccatatgaaagaaacgctgccaatcatctataccccaacggtaggtgaagcatgtgaacacttctctgaaatttatcgccggggacgcggtctgtttatttcatggcctaaccgtcacaacattgatgagatgctgcagggcttttcccgcaatgatatcaacgttattgtggtgaccgacggcgagcgcattcttggcctcggcgaccaggggattggcggcatggggatcccgattggtaaactctcgttatataccgcctgcgggggtatacacccggcatcaacgctccccattatgctggacgtgggcaccaacaacgcccagcatcttgaggacccgctgtatatgggctggcgtcatccgcgtataagcgacgagcagtacatggaatttatggacatgtttgtccatgccatcacgcagcgctggcccaatgtgctactacagttcgaagattttgcgcaaaaaaacgccacccggcttcttaaccgctatcgtcaccagctgtgctgtttcaacgatgatattcagggcacggcagccgtgacctcaggcacgctgatcgctgccgccgctgccgccggtacgcggatccgcgatcagcgcgtggtgtttctcggcagcggatcggccggatgcgggatagcggaaaaaatcattgcgctgatggttgatgacgggctctcagagcaggaagcgcgcaatcgcatctttatggtcgaccgcccaggcctgttgaccgatgagatgccggatttgctggatttccagcaggaccacgtcacgccgcggaaaaatctcacccgctgggataccgatgcggcccacctgtcgctgatggatgttgtacgcaacgtccatcccaccgtgctgattggcgtatccggccagccgggactgttcagcgaagagattatcaaagagatgcaccggcactgcccgcgtccgattattatgccgctgtccaacccgacctcccgcgccgaagcccagccgaaggatctgctggaatggacccgggggaatgcgctaattgccaccggcagcccgttcgcgcccgtattctatgacggtaagacctacgatatcgcccagtgcaacaacgcctatgttttccccggtctggggctggggattctggccagcaaagcggcgcgcgtgaccgaagggatgcttatcgcctgcagtaaaaccctggccgcccactcgcctttggccacccgcgacgccggcggattactgccgccggtcgacgagattgagatgatttcccgggcaattgccgcagaggtcgcacgcgcggctcagcaggatggcgtcgcgccgcagattgacgaggctcagctggccgcgaatatcgataaaatgttctggcgagcgcgctacaccgcgtataaacgatcgccattttgatcgccatcccagacacatattacgggaagcgcgccggcttcccgccgcaccgggaaaccccgcatgattaatgtgctgattgtcgatgatgattccatggtggccgagctgaaccggctgtttctcagccgggtggcggatttccactgctgcggcgtggcccccacggtccgcgaagccagggagatgcttagccatttggcgcaggtcgatctggtgctgctggatgtctacatgcagcaagagaacgggctggatctgctgcccgcgctacgcgccgatgcgcgaaatattgatgtcattatgattacctccgctgccgataggtgcacggttcagacggcgctgcattatggcgtggtcgattacctgattaaaccgtttcagtttccgcgctttgaggaggcgctgttgtcatggcgtaaaaagcgcgatctgaagtatgcgaaatccagctacgcccaggccgatgtggacagcctgctgcgcagcggggttcagcagcaggaaagcgcacgccgcttgccgaaaggacttacgccgcagacgcttcgtctggtgtgccagtggattgacgcctggcaggagcgtgacttttcgaccaatgaactggccgcggcgctgcagatatcccgggtctcatgccgcaaatatctgatttggctggagcagataaatatcctctacaccaccaaccattacggcatcaccggtcgtccggaatatcgttaccggctcgttgccgatcatttggcgctactcaaacaatacggccaatgaacccggtgagcccattggctgcgattttcacccctgatgcggcttcttcttggggtacagctctttacgcttgtagggctcgatttcacccggcttgcgcgttttcagcagcttgaggatccaggtgtactgctcggtatgcggcttcacgaacacttccacctcttcgttcatccgccgggcgatagtgttatcgtccgcttccagcagatcgtccatcggcgggcgcaccagcaccgtcagacgatgcgttttaccatcatagaccgggaacagcggtacgacgcgggcgcggcagactttcattaaacggccgatcgccgggagcgtcgccttgtaggtggcaaagaaatcaacaaattcactgtgctcggccccgtgatcctgatccggcagatagtagccccagtatccctgacgcaccgactgaataaacggtttgatcccgtcgttgcgcgcgtgcatacgaccgccgaaacgacggcgcacggtattccagacgtaatcgaataccgggttgccctggttatgaaacatcgccgccattttttgcccgccggacgccatcagcatcgccgggatgtctactccccaggcatgaggaaccaggaagatcactttctcgttgttgcgctgcatttcatcgataatttctttgccctgccagtcgacgcgagaaagaatccgctgcggatcgcgcaggcctaactccgccatcatcaccatcgcctgcggcgcggaggcatacatggcatcaattatttcttcacgttcctgctcgcttttttccggaaagcagtacagcaggttaatttgcgcccggcggcgcgaactctttgccagacgaccaacaaaacgccccagtttacccaggatcggatcgcggaaagacgcgggcgtcagggcaattgcgccgaaggcaaaaacgccgaaccacgcgccccagtagcgcggcagtaaaaaggatttttcaaattttggaataaattcaatattattttttttcgtttccatgcccaatccgcagaatttccgcttaataaagataatgggttagtttagcgatacgttgagtaacgtacaaaagaaaaagccggcgcacagcgtgcaccggctttaactgacggaaggttagtcaaaccgcagctgcggaatcacctgttttgcctgcgccagataatcggtacggtcggaaccgctgagcccttccgtacgcggcagtttcgccgttagcgggttgaccgcctgctggttgatccacacttcataatgcagatgcggaccggtagaacggccggtgttgcccgacagcgcaatacgatcgccgcgtttcaccttctgcccgggtttgaccagcagcttacgcaggtgcatatagcgggtggtataggtgcgaccatgacggacggcgacgtaataacctgccgcaccgctacgtttagccaccaccacttcgccatcccctaccgacagcaccggcgtgccctgcggcatcgcaaaatcgacgccacgatgcggcgcgacgcggccggtcaccgggttcagacgacgcgggttaaagttcgaagagacgcggaactgacgtgcggtcgggaagcgcaggaaccccttcgccaggccggtaccgttgcgatcgtagaatttgccatcctcagcgcggatcgcgtaatagtctttgccatccgaacgcaggcgtacgccaagcagctggctttgctcgcgcttaccgtcgagcatttcacgcgacatcagtacggaaaactcatcgccttttttcagcttacggaagtccatctgccactgcatggctttgatcaccgcgctaatttcggtgctggtcaggccggcatcgcgagcgctggcgacaaagctgccgcccacggtacctttcagtacgttattgacccagtcgcctttttgcagctcgctgctcattttgaaaccgtttgcaacccggtcataggtgcgggtttcgcggcgcgacatctcccaggtcaggctttgcaggtcaccgtccgccgtcagggtccaggagagctgttggccgattttcagattacgcagctctttatccgccgaggagagccgggcgatatcgcccatatcaataccgtactgattaagaatgctgctgagcgtatcgccggtcgacaccacatattcatggccgccggaatcgctgtccgctttatcatccagctcatcctgagggatagcttcttcttcctgaggcgcctgatcgatgggttccgaagcctctggcagcagcgaacgaatttcgctttgttccagctcgatggttctggagatgggagccgtttcgggatggtggtagatgtagggtcgccagacggcgaccgctaaggtaagaacgctaagcgaccccagcataacgcggtgaggtcgtggcagattgttaaatgcctgagtgacagcgcgggctatctgttgcacgtattcacttcctcgttattctcctttcaggcagctggaatactgattcgccatctggctcaggaattgcgggtaactctctttacccagcttaattccgattccaagtggatccagggttcccatgcgcacggacgttcccctggcaacagcttcgatgaccgctggcctgaactgtggctcagcaaaaacgcaagttgctttttgctcaaccagctgtgttctgatttcgtgtaaacgctgcgcaccaggctggatttcagggttgacagtaaaatggcccagtggggtcaaaccgtagtgtttttcaaagtagccgtaggcgtcatgaaaaacgaaatatcccttccctttcagcggtgccagctcggtcccaacctgcttgtcggttgcggctaattttgcctcaaaatccttcaggttggcgtcaagtttggctcgactctgcggcataagttccaataatttatcgtggattgcaaccgccgaaaggcgcgctatctctggggaaagccacagatgcatgttatagatgccgtgatggtgatcgtcgtcactattttccccggcgccatggtcgtgaccgtgatggtcgtcgtcgtcgtcggtgcctttcatgagtaacggtttcacgccgtcaagctcggcaatcgtcacctttttgttcggcgcaatgctttgcgttgacttatccataaacgcctccatctctggaccaatccagaccactaagtctgcgttctgtaagcgttttgcatccgatggccgcagcgaatagtcatgctcagaggccccgtccggcagcagtacctgggtctcggttaccccatcagcgatcgctgatgcgataaagcccagtggcttaagggaagtgacaaccgcggcgctggccaacggcgcatgggcgaacaaaaaagcggcgctaagtccagcgcaaagaagcgtatttttatgtaacataatgcgtctaatcatcgtatagaatgagagagatgtgatattataacattcactggcttgtgcaacctctaatttgatatgacaaatcttgtaactctggaaaacgtcgcggtcgtttatggccaaaggcgcgtgctgtctgacatttcgctaacgctaaagccgggcaaaattttaaccttactggggccgaacggcgccggtaaatcgaccctcgtgagagtggttctggggctggtagcaccctcggaagggattatcaaacgcgacgggcatctgaggatcggctatgtgccgcaaaagctgcaccttgatgctaccctgccgctgaccgtcagccgctttatgcttttacgtccgggaacgcacaaacgcgacattctgccagcgcttaagcgcgtgcaggccgggcatctgatcgacgcccctatgcagaagctttccggcggagagacccagcgggtactgctggcgcgggcgctgctcaatcagccgcagctgctggtgctcgacgagccgacgcagggcgttgacgtcaacggccaggtggcgctttacgatctgattaaccagctgcgccaggagcttgattgcgccgtactgatggtttctcatgacctgcatctggtgatggccaaaaccgacgaagtgctgtgcctgaatcagcatatttgctgctccggcgcgccggaagtggtctctatgcacccggaatttatctcgatgttcggccagcgcggcgcggaacagctagggatctatcgccatcatcataaccaccgccacgacctgcaggggcggattgtactgcgtcggggaaatgaccgttaatgattgaactactgctccccggctggctggccggaatgatgctcgcctgtgcggcgggtccgctgggatcgttcgtcgtctggcgccggatgtcttacttcggtgataccctggcccacgcctctctgctcggcgtggcttttggtttactgctcaacgtcaatccgttctatgcggtcatcgcggtgacgctgctgctggcgggcggcctggtgtggctggagaaacgcccccacctggcggtagacacgctactcggcatcatggcgcacagcgcgctgtctctgggcctggtggtggtcagcctgatgtcgaacgtgcgcgtcgatctgatggcctatctgttcggcgatctgctggcggtgacgccggaagatttgatctccattgcgattggcgtggttatcgtgctggcgatcctgctctggcaatggcgcaacctgctgtcgatgaccattagcccggatctggcgtttgttgatggcgttaagcttcagcgggtcaagctgctattgatgctggtgaccgcgctgaccatcggcgtggcgatgaagttcgtcggggcgctgattatcacgtcgctgctgattattcccgccgccacggcccgccgctttgcccgtacgccggagcaaatggcgggagtggcggttggcgtgggaatgattgcggtgaccggaggattgaccttctcggcgttctacgacacgccagcggggccttccgtggtgctgtgcgccgcgctgctgtttattttcagcatgagcaagaaaccggccgcctgacgcttatgcgcccgcgtcagccgccatcaaaactcggctgacggctatgggctcacggccgtctgcgaacgttgtagcccggctaaggccttcacgccgcaagccgggacatcaaaccgcaataccgcttcagctatttccccggcttgcgctccgcttagccgggctactggcccctgaggtctgctgttttatagccggacaacgattacggcatttccggcggcgtaataccgaagtgggtccaggcccgtaccgtcgccattcgcccgcgcggcgtacgctgtaaaaagccctgctggatcagatacggctccagcacatcttcaatggtttcccgctcttcaccgatggccgcagccaggttatccaggccgaccggcccgccaaagaatttatcgatgaccgccagcagcagcttacggtccatataatcaaagccttcggcatccacgttgagcatatccagcgcctgagcggcaatctcctcagagatacgcccgtcgtagcgaacctcggcaaagtcacgcaccctgcgcagcaggcggttggcgattcgcggcgtaccgcgcgcgcggcgcgcgacctccagagccccctcttcgctcatctccagtcccatatagcgggcgctgcggctgacaatatgctgcaggtccgggatctggtaaaactccaggcgctgaacgatgccaaaacggtcgcgcagcggtgatgtcagcgagccggcgcgagtggtcgcgccaatcagggtaaacggcggcagatcgatttttatcgaacgcgccgcgggcccttcgccaatcatgatatccagctgataatcttccattgccggatacaggacttcttcgaccaccggcgacaggcggtggatctcgtcgataaacagaacgtcgtggggctcaagattggtcagcatcgccgccagatcgcccgccttctccagcaccgggccggaggtggtgcgcaggttaacgcccatctcgttggcgacgatgttcgccagcgtggttttcccgagccccggcgggccaaaaatcagcaggtgatcgagcgcgtcgccgcgcagcttcgccgcctggataaagatctccatttgcgaacggacgtgcggctggcccacgtactcttgcagcaatttaggacgaattgcgcgatcggccgcctcttcaaaaccgctgctgtccgccgataccagcctgtctgcttcaatcatcccttacctcacaacgcggcgcggagcgcttcgcgaattagcgtttcactgttggcatccgggcgtacgattttgctgaccatccggctggcctcctgaggtttatagcccagcgccaccagcgcggcaaccgcttcctgttcagcgtcatcgtcagacgggccagccggcgacgtcaggaccagatccgctgccggcgtaaacagatcgccgtgcagtcctttgaagcggtctttcatttcgacaatcaggcgttccgcagttttcttgccgatccctggcagtttgaccagcgccgccagctcttcacgctcaacggcattgacaaactgctgcgccgacatgccggaaaggatcgccagcgccagctttggaccgacgccgttggttttaatcagctctttaaacagcgtgcgctcctgcttgttattaaagccatacagcagctgtgcatcttcacggacgataaagtgggtgaaaatgatcgcctctttacccacgtccggcagctcatagaagcaggtcatcggcagatgaacctcatagcctacgcctcccgtttcaagtaaaaccagcgggggttgtttttcgagaatgatgcctctgagtctgcctatcacatggagctcctggattaagggccgaaagtctaatgcggtatcataaaaaaaggctggatagatatccagcctgatttcaggttatcgtaagcgtccgcgcgccaggttcaggcggctttcgccgatctgagctgcgttctggctgacgtggcaatgggtgatggcgatggctaaagcatctgccgcatccgcctgcgggttagccggcagcttaagcaacgtgcgcaccatgtgctgcacctggctcttttccgcgctgccgatgccgacaacggtctgctttacctgcctggcggcgtactcaaagaccggtaggtcctgattcgtcgccgcgacaatcgccacgccgcgcgcctggccgagcttcagcgccgagtcggcgttctttgccataaacacttgttcgatggcgaagtagtccggctggaactgggtgataatttccgtcacgcccgcatagataagcttcaggcgagacggtaaatcatccactttcgtgcgaatacagccgctgcccaggtagctcagctggcgtccaacctggcggatgacgccataaccagtgacgcgcgaccccgggtcaatgccgagaataatggccatcacgcgcctccggttagtggtttaacggtcggcaacattagagcgttgcggcgacctcatcagagatctcgccgttatgataaacttcctgcacgtcgtcgcaatcttccagcatatcgatcagacgcagcagtttcggcgcagtttccgcgtccatgtccgctttggttgacgggatcatcgagacttcagcggcgtccgctttcaggccggcggcttccagcgcatcgcgtaccgcgcccatctcttcccaggcggtataaacgtcaatcgcgccgtcgtcataggtcacaacgtcttccgcgcccgcttccagcgccgcttccatgatcgcatcttcgtcgcctttctcgaaggagataacgccttttttgctgaacaggtaggaaacggaaccgtcggtccccaggttaccgccggttttggtgaaggcatgacgtacttccgccacggtacggttgcggttgtcggacagacattcaaccattaccgccgtgccgccaggaccgtaaccttcatagatgatggtttccatgttcgcatcatcatcgccgccgacgccgcgcgcgatagcgcggttcagggtgtcgcgggtcatgttgttgctcagcgctttgtcgattgccgcgcgcagacgcgggttagagcccgcatcgccgccgcccagacgcgcggcggtgaccagctcgcgaataattttcgtaaagatcttaccgcgcttggcatcctgtgccgctttgcggtgcttggtgttggcccatttactatgacctgccataaaaaactctccaaaaaaaagcgcgccctttcaggcggcgttaattacaaattcttcaatcgcctgccggttgctccaggacttggtcaacgtggcggcttccgccgcgtcaacccagcgatagtccagatgttccgtaaagacaatctggcgttcatgggggagcgcgagacggaaccaaaactccgtattgcgctcaacgcccggcgcatagcgatgacgtaaatgagaaaatatctcgaattctaccgtacgctgacaatcaaccaaagccagctgctcgcaggcaacatcgatagcgacctcttccataacttcacgcgcggcagcctgcggcgcggtttctccctcttccaggctgccggtaaccgactgccagaacgcgggatcgtcgcgccgctgcaacatcagcacccgcttcgtatcttcggcgtaaatcaccaccagtacggaaacggggagcttgaatgacatcttacttattctccagagactcttttgcctctttcgccaccacctgaataccgagttcgctcagcgatgccgggttagcgaagcttggcgcttcggtcatcaggcaagcggctgcggtcgttttcgggaaggcgataacgtcacggatattatcggtaccggtcagcagcatggtcaaacggtcgaggccaaaagccagacccgcgtgcggcggggtaccgtatttcagcgcgtccagcaggaagccaaacttctcgcgctgctcctgctcgttaatgcccaggatgccgaacacggtctgctgcatctcaccgctgtgaatacgcacggaaccgccgcccacttcatagccgttgatgaccatatcgtaggcgttggccaccgcgtcttccggcgcggctttcagctcggcggcggacatgtctttcggcgaggtgaacggatggtgcatcgcggtcaggccgccttcgccgtcgtcttcaaacatcgggaagtcgatcacccacagcggcgcccatttgtcttcgtcggtcaggttcaggtctttgcccagcttcagacgcagcgcgcccagcgcgtcggcgaccacttttttgttatccgcgccgaagaagatcatatcgccatcctgcgcgccggtgcgctcaaggatcgcttcaacgatgtcggcgttgaggaatttagccaccgggctgttgatgccttcaaggcctttcgcccgctcggttactttaatataggccagccctttcgcgccgtagatctggacaaacttaccgtattcgtcgatttgcttacgggtcagcgcagcgccgcccggtacgcgcagcgcggcaacgcgccctttggcgtcgttagccgggccggcgaagacggcgaattccaccgctttcaccagatcggcgacgtccaccagctccatcgggttacgcaggtctggtttgtcagaaccgtagcggcgctcggcttcggcgaaggtcatgatcgggaaatcgcccagatccacgcccttcacttcctgccacaggttgcgcaccagcgcttccatgacttcgcgcacctgcccggcggtcatgaaggaggtttccacatcgatctgggtaaattccggctgacggtcggcacgcaggtcttcgtcgcggaagcatttaacgatctgatagtagcggtcaaaaccggacatcatcagcaactgcttgaacagctgtggagactgcggcagcgcgtagaatttccctttatgcacgcgggatgggaccaggtagtcgcgcgcgccttccggcgtggctttggtcagcatcggcgtttcgatgtcgaggaaaccgtggtcatccataaagcggcgcaccaggctggtgattttcgcacgggtcttcaggcgctgcgccatttccggacgacgcaggtccagatagcgatatttcagacgcgcttcttcggtattgacgtggttggagtccagcggcagcgcttcagcgcggttgataatcgtcagatccgatgccagcacttcgatggcgccggtggccatatcactattgatgtttttttcgtcacgcgcgcgcacggtaccggtgacctggatgcagaactcattacgcagttcagaggccagctttaatgcgtcggcacgatccggatcgaaaaacacctgtacgatgccttcgcggtcacgcatatcgataaagataaggctaccgagatcacgacgacggttgacccaaccacacagagtcacttgctgccctacgtgggacagacgaagctgcccgcaatattctgtacgcatgagatatcccttaacttagccgcaggcggattgttgcctgtcttgcaggcgacgaggtcgcagctttagctgatgtcacaactgaatgaaaaaaggcggctattatactggaaattatggcgcacgataagcccggcgcagcgcgcagcgttgctttgctgcgcgcttattgcttgtactcacaaaaattaacaaaatttgttaccctcgggcgagatcggcaacggtattgtagcgacctgacaacagaagaagatacggggatatcatgttagaactcaatgcaaaaaaaaccgcgctggtggttatagacctgcaggaaggcattttaccgtttgccggcggcccgcatcgggctgacgacgtggttgagcgcgccgcgagtctggccaaaaagtgccgccagcagggttccccggtggtcatggttcgcgttggctggtcggcggatttcgccgaagcgctgaagcagccggtcgatgcccaggcaggcgcccatacgctaccggaaaactggtggacctatccgctggcgctggaaaagcaggagagcgacatcgaagtcaccaaacgccagtggggagccttttacggcaccgacctggagctgcagcttcgccgtcgcggtatcgatacgattatcctgtgcggtatctcaaccaatatcggcgtcgaatcgacggcgcgcaacgcctgggagctgggcttcaatctgattctcgttgaagacgcctgcagcgcagcaacggctgaacagcatcagggcagcatgacgcacatcttcccgcgtattgcccgcgtgcgcagtaccgaggaggtacttgccgcgttatgatctatattgggcttccccaatgggcgcacccgaagtgggtgcgcctgggtatcaccagccttgaagagtatgcccgccattttaactgcgtggagggcaacacgaccctgtacgctttaccaaaagctgagattgtcagccgctggtatgaacaaacccacgatgattttcgcttctgcttcaagtttccggccaccatttcgcaccaggcatcgctgcgcaactgcgacgacttaagccacgagtttttcacccgcctggcgccgctgtcatcgcgcattggccaatactggctgcaactgccggccacgttcggccctcgggatcttcccgcgctctggcagttcctcgacagcctgccgcgcgaattcagctacggcgttgaggtaaggcatccggagtttttcgccaaagaggaagcggaacaacagctcaatcgcgggctgcatcagcgaaacgtcaaccgcgtgatcctggatagccgtccggttcatagcgccgtcgcccgcagcccggcgatgctcgatgcacaaagaaagaagccaaaagtccccgtccatgcgctggtgacggcccaccatccgatggtgcgttttatcggcagcgatgacatggcgcaaaatcgtgagctgtttagcgtgtggttacgcacgctgccaaaatgggcgcagacaaccacgccgtacttattcctccataccccggatatcgcccaggcgccggaactggtcgacaccctgtggagcgatctgcgcgccgccctaccggaaataggggcggcaccttcaattccgcagcaaacctctcttttctgatatcctgctatcctcaattgagccaccggaagcgataaaagggagttttgagtatggtcagcgcgctgtatgcggttttaggtgcgttattgcttattaagttttcctgggacgttgtacgactgaggacgcaatatcgcgttggctacggcgacggcggttttagcgaactgcaggttgctatacgcgtgcacgggaacgcggtggaatatgttcccattggcctgattctgctgctgtttatggaaatgaacggcgcgcagacctggatggtccacgtctgcggtattttactgatcgccgggcgcctgatgcactcctatggctttcatcatcgtctctaccgctggcgtcgttccggcatgagcgcgacgtggtgttcgttgttgctgatggtgctggcgaacttctggtatatgccctgggagttggttttctccgtccgttagcgcacaatacgccgttttcgatttttcgggtttaacgttatgtctcaccgcgatacgcttttttccgcgccgattgccagtctcggcgactggacctttgatgaacgggttgctgaagtcttcccggatatgatccagcgctctgttcccggctattccaatatcatttccatgatcggcatgctggcggaacgtttcgttcagccggatacccaggtttacgatctcggctgctcgcttggcgcagccacgctgtccgtgcgccgcaatattgcgcatgccggctgcaaaatcatcgccgttgataattcgccggccatggtcgaacgctgccgtcgccatattgacgcctataaggcgccgacgccggtcgaagtgattgaaggcgatattcgccacgtcacgatagaaaacgcctcgatggtggtgctgaacttcaccatccagtttctcgaaccgggcgaacgccaggccattcttgataaggtctatcaggggctcaatccgggcggcgcgctggtgctgtcggaaaaattcagcttcgaagatgacaacgtcggcgaactgctgttcaacatgcatcatgatttcaaacgcgccaacggctatagcgagctggaaatcagccaaaagcgcagcatgctggaaaacgtgatgctcaccgattccgtcgaaacccacaaagcgcgcctgcgcaaggccggtttcgaacatgccgaactgtggttccagtgctttaacttcggatcgttaatcgccgtaaaatccggggaccaggcatgattgatttcagcaacttttatcagttgattgccaaaagcccgctgtcgcactggctggagacgctgcccgctcaggtggcggcctggcagcgtgacgcgctgcacgggaaataccgggaatgggagcgggccgtagagtttctgcccgagttttcgccctaccgactggatctgctgcatagcgttaccgcggagagcgaaacgccgctgggcgacggtcagcgtctgcggattgaaaacctgctgaagaatctgatgccgtggcgtaaaggaccctggtcgctttacggcgtgaatatcgacaccgaatggcgttccgactggaagtgggaacgcgtactgccgcacctttccgacctcaccggacgtaccatccttgatgtcggctgcggcagcggataccacatgtggcggatgattggcgccggggctcgtctggcggtgggcatcgatcccacccagctgttcctttgccagtttgaagcggtgcgaaagctgttgggcaacgatcagcgcgcgcatctgctgccgctgggcattgagcagcttccggcgctgaacgcctttgataccgtcttttcgatgggcgtgctgtaccaccgccgctccccgctcgatcacctgtggcagctcaaagatcagctggttcccggcggcgagctggtgctggagacgctggtcgtcgagggcgacgaaaataccgtgctggtgccgggcgatcgctatgcgcagatgcgcaacgtctactttatcccttctgccgccgcgctaaagcagtggctggagaaatgcgggtttatcgatgtacgcatcgtcgacgcctgcgtgacgtccaccgaagagcagcgccgcaccgagtggatgaccaccgagtcgctggccgacttcctcgatccgcaggatagcagcaaaacccgcgaaggctaccctgccccgctgcgcgcggtgcttattgccaccaaaccggaaacagaacagtcgctggcggcgaaaaagcgggccgacaagcagcctggctaacgcgttttcaggataaaaaaaggcccctgtttaatgggcaggggcctggtacgggcaatcatcatattgggcgacatgatgtgcagcaaaaaacggtttatccccgtcatacttcaagttgcatgtgcgttggctttgttactcggctcatccatgagcctcgcccttacgggccgccgggatacggcgttcaaatctgttccagacagatttgtcgctcaccccagtcacttacttgagtaagctcctgtggattccctgcgtcgccgccttctcgcaactcgaattatttagggttttaatctctctgtgcggaaataatcttcttcatttccgctaccgcttcgccattgacggcgtagcgtaagtattcatctgcttcggcatccgtagacatcgacagcccgggattgcgaaagcgcatcggggacggtaaccactggcctgccgaggagtgcacctcttttacccctgcctgcaaaaatagcggcaggttggcggcgcggacgcctgcaccggccataataataggagtatcgctttgggaaataagttccctgattaatgaaattcctttttcggctgaagactgctggcccgaagtcaggatacgctgaacgccgagttcagccagctcagcgctggcctggcgcgggtcggcgcacatatcaaaggcccgatgaaaggtgacggccagggttcccgccgccgccattatttttttcattcgcgccctatccacccgaccgtcggcgtccagaacgccgatcaccatgccgggaaaaccgagatccttcaccgcggccacatcatcaagcatcgcggcaaattcgccggcggtatagcaaaaatcaccgccgcgcgggcgaataatcggatgaacgggaatggtcaccgcttcacgcaccgatttcagtacccccagcgaaggcgtcagccctccctcctgcggcgcggcgcatagctcgatgcgatcggcgccccggcgctgggcctccagcgcgcactccatgctgtaacaacagacttccagtaaggtcattcttctctccgtcgatagggcaggcactacagaatgtcacgatttcttccggcagacgccgcgtcgcttcacactgttatcgttcagcgtgttcgctggcgacaatttgctcaatcgaccacgggtgaaatttgatcgtcactttgccatccgttaccgccagggtcggattcggtaaacgctcacgctctcctttcggcgcgctggtcttcacaaaaatgcccggctggcccagcccttcatcggaaagcagcgccagcgcgcgggtattgagcgtttcaggatcgcccggcagaacgatttcaatatgctcccagccttcatgcggatagcgcttttcgcccggccacggcagttcaacaacgctaaaacgccagtgcgccacgaccaccggctcatccagcctgaacaggcagatgggtcgaccgttaataacattttccgacagcagagtagcgcattgttcaaagccgcgacgccagcgctccaccgtagcgttctggtgacagcgcagggaaatatggtcggcgtcatggggcgtaatatcgagaccgagccggtgagcaagcgcgttcagcgcctcggtaaagcgcggcaggtccgcggaaatatcgttcagttcatctatctgctgccagttcgccatcgtaagcctcggtactcgctaaaaagcgctaatctatcgcgttttccgcgaccgaccaaccggcaatcgccggcagcgtcccgcgaacggttattcgttgagcgcgaggctcagcaacctccgcgcggtgctgacgcgtgggtgcaaatgcagtatactcctgccctaatttgtccacattcccgcgccgccccatcagggtgacggcgtgttaacgtaaggtgtttcggtgaatattcaggctcttctctcagaaaaagtcagtcaggccctgatcgcggcaggcgcgtctgccgattgcgaacctcaggtccgccagtcagcaaaagtccagttcggcgactatcaggccaacggcgtgatggccgttgccaaaaaactgggcatggcgccgcgacaacttgcagagcaggtactgtctcatctcgatctgagcgggattgccaataaggtagagatcgccggccctggctttattaatattttcctcgatccggccttcctcgcggaaaacgtcagcagcgcgctgaaatcggaacgtctgggcgtggctcagccgcaggcgcagacggtggtcgtcgattactccgcgccgaacgtggcgaaagagatgcacgtaggccatctgcgttccaccattattggcgacgccgcggtgcgtacgctggagtttctcggccataaagtgatccgcgctaaccacgtgggcgactggggcacccagttcggcatgctcatcgcgtacctggaaaaacagcagcaggaaaacgccggtgaaatggcgctggccgacctcgaaggtttctatcgcgaagcgaaaaaacactacgatgaagatgaagccttcgccgagcgcgcgcgcagctatgtcgttaagctgcagggcggcgacgagtacttccgcgaaatgtggcgcaagctggtcgacatcaccatgtcgcaaaaccagttaacctataaccgcctcaacgttaccctgacccgcgacgacgtgatgggtgaaagcctctataacccgatgctgccgggtatcgttgccgatctgaaagccaaaggtctggcggtagaaagcgaaggcgcgaccgtggtgttccttgatgagtacaaaaacaaggaaggcgaaccgatgggcgttatcatccagaagaaggatggcggctatctctacaccaccaccgatatcgcctgcgcaaaataccgttacgaaaacttgcatgctgaccgcgtgctttactacatcgactctcgccagcaccagcacctgatgcaggcgtggaccatcgtgcgtaaagccggctacgtaccggattccgtcccgctggagcaccacatgttcggcatgatgctcggcaaagatggcaaaccgtttaaaacccgcgccggcggtaccgtgaagctggccgacctgctggacgaagcgctggagcgcgcacgccgtctggtggcggagaagaacccggatatgcccgccgatgagctggaaaaactggcgaacgcggtcgggatcggcgcggtgaaatatgccgacttgtctaaaaaccgcaccaccgactacatctttgactgggacaacatgctggcctttgagggcaataccgcgccttatatgcagtatgcctatacccgcgtgctctccgtgttccgcaaggcggatatcgatgaaagcgcgctggcggcggcgccggtggtcatcaccgaagagcgcgaagcccagctggcggcccgtctgctgcagtttgaagaaaccctgacggtcgtcgcgcgtgaaggcacgccgcacgtgatgtgttcttacctgtacgatctggcgggtctgttctccggcttctacgagcactgcccgatcctgagcgccgaaagcgaagagacgcgcaacagccgcctgaagctggcgctgctgacggcgaaaacgctgaagctgggtctggataccctgggtatcgaaaccgtagaacggatgtaaaaacaaacccggcgaaagccgggtttgttttataacgcctgatggcgccacgctcatcagacctgcagcatcattgtagccccggtaagcgtaagcgccaccggggaaattccgcccttctcagaaatacttccgcagatactccgtcaggcacaggatcgccatcgcctggccatacggcatcgacgtcagcggaatgtcgcgataaaaatccagattcgaacccatgccggtaccgaacgacgtttgcagcagctccccttgcgctgaaatattctgcacgatgccgcgaatcgctttttccgcaacctccgcatacgcctggctcacgtagcgcttgcgcaccgctttgaggatcccataagcaaaaccggcggtcgccgacgcttccagataggagtcaggatcgtcaagcagcgtatgccacaggccgctatcgtcctgacagcgtgccagcgccgcaatctgcgcattcagcacctgcaccagataacgccgtaccgcgctgttctcgggtaaatccaccagctccaggaaatccggaataacgatagtcagccagctattgccgcgggcccagcgagcgtgggcgaaattatgccgcccctcatagctccagccgtgaaaccacaggccggtctcacggtccatcagattctgcacgtgcagcagaaactgatataccgcttcctctacgtattgcggacgattaagcagcttgccgattttcgccagcggcagaaccgtcatcatcagcgtgtcgtcccacatctgctgatgattctcttccgccagggtgatgtgctgcatgccgccagactcagtgcgcggcatttcgttcatcgcccactccgcccagctatcgagccagggcagatacgcggggttgcccgtctcttcgtagcggtaagccagggtgagaaacggcgccatggtgttaacgtttttggtggtcgcgccttcggcaaagcggtcggcaaaccagccatcaataatgtcgcgcatcgccgtatcgccggtctgctggtaatactgataaataccgtacaggccgacgccgtgagtccactcccagccgttccaccctttggtgtcgataacgcgtccgtcgtccagccgcagtaaaaattgcccgctttcgtccttaatgttgaccagattgtgcgtcaccttctgaatcagcgcctgcagttcattgcgggcgataaaacgctccggctggcgcagtagtgggctatgtttgacaggccaaactttcatatccttaacctctgttatatgtcgaattcatggctgaacgcggcttcagcgctggcgcggcgggtttattccgattcagataaccaatattgttgtttccccacagggcgtcgtacggcatcccggccagcatctccaccacctcacgatccccggcgctggccagttctggctgagcgcggccggattcacgcattttcagcgtttccgcgcgcaggacgctgtgggtttgcagattgagcttaaagcgcagggaaacgaggaaaccgcaggccagcaccagtaaggtgcccacgctgaggatcagcagaatggtatggctcacttcatagggctgcgttttctgtccggagacaaagcccgacatctgcatgatgatccccaccagcatcaccgctccggcctgggaagctttacgcgtcagggtcatgatcccggcaaagatgccttcgcggcgctggccggtgatcacttcgtccacgtcggcaatataggtgtaggtgttccacggaacgtagttgatgccgccgcggcccaggcccgccaccgcggatatcagcagcagcagcgaatagacatcgctgaggccagcgtagtacagcaccgcgtaagagagcgaactcaggccgaacagcaccaccaccatgcggtacgatggcgccggcccgaagcgaatacacagcgggatcatggcgataaccgcaataaactggaagatcgccatggttccgagcaggttagaagccattgaggcttcctgcatcaggacaaacaccacatagtaggtaaagaccgcattgaagacgtcctgggcgatatagccccccagatacatacccagatgctgacggaaaattttaatgcgcagggtcgaacttaactcaatgaacaggcggttaagactctgcgacaggctcaggttctgtttctcctcttcggcgcgcagcgcggcctccgtccactcttcacgcgggcgttcccaggtaaagaaccagacgaaggtcagcatcatggcgcacagcaccgagaacaccaggctggcatagaagaaagaaacggcgttgtccttaccaaagatagtcagcagaacgcccggcaggaaggaagccagaatcgccgacatctgcgccatagaaatacgcgcgccggagaatttggttttctgtttaaaatcatcggtcatttccggtaccagcgtttcatacggcaccagaatcatggtgtagacaatatcaaaaagaagataggtcagcaggtagtaccagaaccccatatcccctacccacatgatggagtagctaaacacgcaggggatgccgagcaggatgaagaacttacgcctgccaaaacgtttccccagccaggttgagccaaagttatccgtcagaaagcccatcagcggactgattaccgcatccagaaccctggcggtggcaaaaataagcgtcgcctcgataggggaaaggccgcaaaaggtggtgtagaagtagagcagccatgctgctgtgagtgcggtcgttcccgcaccaaggaaatcgcccgatccataggcaaggtagttaaccaaaccgattttacgtgttttcatcgccgtaaatcctgtgtctttttttagagaactccgaaccgcgttttggcccattcagccaaaagggggttgatacatggctacattaagaacatgggaacggcgttaccttttcatttttgccagccaaaagcgttcaatggcaaaaacacaaagagtcgatgaacgcgcctcactgatttataaaacagcgtttcttttaatacaaaagatcggaccaaaagttgcgaagcgaccacaaaaatggcgcagggcggagtgaaatctgggcgcgttatttcgctgcggataaaccttgcgaaagctaaggaatgggagtaaagacaatagaaaagggttgtttcgcgtatctcaaggaggcttgatgccctactcacatctgctggtcgccgtggcgccaaccccggaaagccgggtcctcattcagaaagccgtctccatcgcccgtccggtcaatgcgaaggtcagcctgattaccctggcaacggacccggagctgtataaccagtttgcggcgccaatgatggaaaatttacgcgaagtgatgcaggaggagacgcgcggctttctggccgagctcgcccgccacgccgactacccgatagagaaaatgactatcgccagcggcgggattgcccaccatgtgaaggatttttgccagcggcatcgcgttgacctggtgatttgcggcaaccacaaccagagcctgttctctcgcgccacctgttcggcgaaagatatcgtgggcagcagcggcgttgacgtgctgctggtgtgtctggaaaaaggttagcgccgaaagcgctaaccgcgatcgtctcaggcgagcttggggaaggtcgcgaccttgcgcgctaagtggctctcctcacttcctggctcaatctcctttagatcggcaataaaccgctcctgccagcgatgaatatcgttatctttaatcaccgccagcatggccgaatggcgggcaatacgctcggccagcggcatggttaacgcctggtccagcgcagccgcgacctcgtcgcgatcgtaaggattgacgattaaggccgtcggcagctcgttcgccgcgccggcaaactgcgacagcaccagcacgcccggattttgcgggtcctgcgcggccacatactctttcgctaccagattcatcccatcgcgcagcggcgtaaccagaccgacgtccgagtagcggaagattttcatcagcagcttgcgttcaaagtgctggttcaggtaataaagcggcgtccagcccagctggccatatcggccattaatgcggccggccgcggtttcaagctgatgacgaatatcctggtaggcctgaacatcgccgcgcgacgtcggcgcaatctgggtatagcgaatcttgccgtgatgctgcggatagttctccagcagcgcctcgtaggccagaaaacgctccggcagccccttggaatagtccagccgctcaacggaaaagatattctgcacgcttttcagttcgctcttcagctgcgccagcttcggcggcagcggcccttttgcgctccgcgcaatctcttccggatcgataccgatcggatagacttcggtgtggaaaggtttcccccaggccacatgctttttgccgtcgcgcgtcgtcaggcgagtctgcatcgatacgcaatcgagaaacgccaggcgatcgctctcggtctggaaacccagtaaatcgtaatcgcacagctgttcaagcagctccgcgtgcggcgggagcgcgttaaagacttccggcgtcgggaacggaatatgtaaaaagaagccgatgcgattattgaccccgcgctggcgtagttcgctggccagcggcagcaggtggtaatcgtggatccagacgatatcgtcaggttcgatcagcggcagcagtttatccgccagcgttgcgttgacgcgctgatagccttcccaggcttcacgctgaaaatcaaccagatcgagacgatagtggaaggcgggccataaaacggcattggaaaagcggttgtaatattcgtcgtgatcctgctcgctaaggttaaaggaagcccaggtgatattcccctgcttcactttttttaacggctgctggtcgtcaccgatttccccactccagccgaaccacagtcctccggctgcttttaatgcccccataatccccacggcaaggccaccggcgctggcctttttgtcatccggcggggcaatacgattagatactacgactaagcgactcatagccatctctcctgtcggttagcgcatctggttgttgcccatgattcgcgatgttactaatccaaagatgaacagcggcgacatccggcaggcgccagtgcgcctgggtctcaccgccgcccactttgaccgatacaccactcagttgattgacgacgctaaaacccgcttcatcggttaagtcatcaccgacaaacaccggcctgcgcccgctgaatggagcttcctgcataaaagcggctatcgcttcacctttattcactccgcgcggtttgatctccaccacgcacttacccggctgtaatgccagaatgggatggcgctgcacgacggcctgcgccagcgccagcactgcgtgctgatgctccggcgcctgtcggtagtgcagagcaaaggccatccccttactttccagttcgcatcccggcaagtcatccagcgccgcggtcagttccgcagagagcgccttctggagagaatccggtaaagagacaatatgcgttttaccattgatatcacggcgttcagccccgtggacaccggcaagcggcagccggtaaggacgggtaagctcatccagctcaaccattgagcgccctgaaatcaatgccaccgcgccgttgtgctgctgcacgagctggcgcagcgactgcaaaacatcggcaggaatgaccacctgatcgggatggggtttgataccggcaagggtaccgtcgaggtcaaagaaaaaagcgcagtttccggttaacgcaggcggtacataaatctggtcagccaccctgtttcctccttatcatggccagcaacatgctgggtgttaaataattgtagccatgtaagtatagacagtgtgaccagcctcgccatttttgatagtcattgccagcgcaacgagcgctggcaatggattaggattaaactgaaaagttggacgaatcaaacggctcgtttcgctttctgtttgtagcggtcaaagatcaccgccgccagtaaaatcacgccgcgtacgacatactgcgagaatggcgagatattgagcaggttcatcgcattctctaccgttcccaggatcaggatcccggccaccacgtaggagatcttaccgatcccgcctttcaacgatacgccccccagcacgcaggccgagatgacaatcagctcatagccaattgaggtcatcggctgtccgctggtcattcgtgaagccaggataatgcctgccgctgcggaaaccaggccggaaaggacgaaaatgatgatcttggtccgcactaccggcacgcccgccagacgcgccgcttcttcgttaccgccaatcgccagggtattgcggccaaaggtggttttattcaacaacaggccgaagacaatcaggcaggcaatggtcagccagataggcgctggcaggccaaaccagttggcgtagccgagggtaaagaaacgctcgtcttcaatcccaaccgctttaccgtcagagatgatataggccagaccgcggacgatctgcatggtggccagggtggtgatcagggcgttaatcttcaggcgggcaatcacaaaaccattgaccaggccactcagcgcgccgagcagcagaccggcgccgatccccacccacatgctctccgtcaggttaatcaccaccgccgtggtcacaccggcacaggcgataaccgaggcgaccgacagatcgaaatcccccgatgccaggcaaaacagcattccgcaggccaccattccggacatagaaatagccagccccaggcctttcatattaataaacgaggcaaaattaggcacaaaaatcacgcagccaataaacagcaccgcgaaaacaaccagcatgccgaactgatcccaaatgcgggagaagctaaaagccgaccgggtagtacctgaagtggtaactgatgacatcatagactccttactcaggcgaccgcctggctcacttttggcatggcaaggctcaatgcctgctgttcattcgcatgttcatgcagcagctctccggcgatctccccctcgcgcatcacaacaatgcgatcggcgacgccgagaacttccggtaaatcgctggaggcaaagaccaccgcgacgcccgatgccgctaatgcgtagataacgttgtagatttcatgtttagcgcccacgtcaataccgcgcgttggctcgtcaagcaggatgactttcatctcttccgacagccagcggccgaggatcgccttctgctgattgccgccggagaggttcataatcagctgctcggcgccgggcgttttgatattcagcgatttgatatgctggtcggcgttctgcgcttcccaggcattgttgataacgcagccggcgagaatatgcttgcgacgagcgctgatattgatgttgtcgcgcaccgagtggaccggaataatcccctccgctttgcggtcttccgggcagagcatcatcccggcctgaatcgcctgagccggcttgcgaatatcaatggcctccccgtcgatataaacctggccgccggttattctgctgccgccgaataagcctttcatgagctcgctgcgcccggcgccaaccagcccaaacaggccgacgatttctccgctgcgcaccgaaaggctgacgggctgccgcacgcctggcgccttcacctgttcaagacgcaaacgctctttgccatattcacgcggctgccagccgtagatatcgcccagctcgcgccccaccatcgcctgtaccagcgcgtcgtggttaacctcttgcatattgtcgaaggtacgcacgtagcgaccatctttgaacaccgtaatcgcgtcgcttaacgcgaagatctcttccatgcggtgggaaacgtaaataatgacccgtccttcctggcgcagctcgcggataacccgaaacaggttttcgatttcccgcgcagacagggagctggtcggctcatcaaaggcgataatttttgcgttacgcgccagcgccttggcgatctccaccatctgccactggccgatagagagatacttgagcggcgtttccggatcgatatccagccccagatgcttcagctgcaggccggcttcataattcagcagcgaccggttcacaatcccgcctttatgcggcagctgcccgaggtagatattttccgccacggtcatttccgggatcagatgcagctcctgatagataatggccaccccggcgttcagcgcctcggtggtgtgggtaaacgtcatctgctggccgcggatttgcaggctgccggcggtgggtatgtagttgccgctgagaattttcagcagcgtggatttcccggcgccgttttctcccatcagggcgtgcacctgtccggcatagcagccaaagctaatatcggacagcgctttaacgcccgggaatgtcatggtgatgccgtggaatgagagataaggggtagactgttgcataacgactccgcttttctgtacagagcctctcgcgcaaggcaagaggcccggtcaactggccttacagcccttttttcgccagctcttctttaaagttgtcgcgggtaatcagcaccacgtcggttaccgcggtgaatttcggcggttcaacgtcttttgtcacccagttgtaaagcatttcgctggttttatagccgtgaatatccgggcttggcagcaaagagccatagaaaccggtggcctgcgctttagaaagttcgttcaccgcatcgacgccgttgataccgatcccgataacgtcgggcgctttaaagccctggccttcggtggcgcgcacgccgcccagcacggtgttgtcgttcatgccgacgatcagccagtgcttaacatcaggatgttgaaccagcatggagttaccggcgtcaaacgcgccggggatgtcgttagatttggttggcacgcgatagatttgttgctccgggaaaccggcggctttcagagcgtccattgagccggtagtgcggcggcgggcggtatccagctcgtcggaagtaatggccataaccgcggtatccttcacgtcccaaccgcgtttctgcatctctttatagagctcctgcccctggcgcgcgccgatttcgctggccgccatcatcaccagcggtacgctgtccatcggtttgcctttggcgttgacgaactggtcatcaacggtaatcactttcatatcatagccgcgcgctttggcgacaatggccgccccgagcttcggatccggggtgcaaatgacgaagcctttggctccgctggccgccaggctatctatcgcgttcagggttttctcgccgtcgggcacagcaattttaatgacatcgaaacctaaatctttaccggccttatcggcaaatttccactcggtttgaaaccaaggctcttcaggctgtttcaccagaaaacccagcttaagcgtctcagccatagctgattgtgacataaccgcggcaagaccgattgccgccagcgctttagtaaatttgtgcatggtaaactccagctttaattcgcttttatgtagggaataataagtcttaaatttttaatcggacgaaaaacaaggcattagaaaaatctcaacgctgagtgccgttgtttaaatagtattaaccggaaattatttctccatacgagagcccaatcacatcgcggaattacagtaattgcgtgcatataaacagcgaaaaatgacataaaaaaagcgctaattgtcagacaattagcgcatgccgtagcaatattctctatatcatcagcagagttatccctgtagagattaccagcgacaataaatgtgctccgcatgattgcgaacgggcgcctcatcccccaataaacgggcggctacggtaaacgaaaaatcaaaaacgtgtcccaggcctttaccgctaatcaaattaccgtcctccactaccgcctggtccacgtactctccgtccgtaacgtgctgccataactctcccgaacagacgtagcgtcgccccttgagcagcccgttgccaccgagcactctcgctgccgccgaacagatcggacagatcagctttcccgcggtatcgtgggccgaaataaacgccacgacgtcccggctggcggcaagattgacgcttccctgcgggccgccgggcagaaccaccgcgtcgtacagtatcccgacgcgctctgttagcgtgctgtccgccaccatggggatatcgtgatagctcaccaccgcgcgcgaatcggcgcaggagagcagttcgacatcgaggtgtaagcgacgaagaatatcaatcaccacaatcgcttcaccttcctcaaaacccggtgccagcagcaccgcaacttttttcatttccgactccttcagatagcctgttagcaataatgtgtttacaaaagcagcatctttttaaattaacctcatcattttctcactcgcaggctaccacaaaatagaattattaatcattatttttaaaacacaatttcaacaaaatcattagaactactatcaattaatgaagcgcggaaataaaaacatttaaaatcagcaaaataagcttatatgcgatcgttaaacatcagactttattcttacaaaagcccctcttttcaagataaatacggatgttgtaacgaaatgtaaacatcactcattgagagttttcttaattcaaatatggcgctattctatatttgttgagataagaaatttaattcaaacggctgtgcagaaatcctgaatactattactcaggactctctctgtgcaccgtaatttctaaggcgaccctgatgtagatgcgtcaagatatgacgcccgccccctccaaagtgaataaggatatttgtatggtcgtaccaggaatggttcaaaagctgaataaccagatgaatcttgagttctatacctcaaatttgtatctgcatttgagcgaatggtgtactcagcaacggttgaacggtaccgccacttttctccgtaaccgagcgcaagccagtatcacgcagatgatgcgggtctttgattttatgaaaaaatcaggcgcctggcccgttgtgaaagcggaaggaacctacggcactgaatgttcgtccctggaagatctctttagcaaaaccgtcgaagattatcagcagcgcagcacgatactttccagcctggcggaagaggcgaaggcgcaaagcgatgaatcaaccctgcgttttctgacgctgcttgctgaagagcaggatcaggatggcatactgctggagaccattcttgaagaaatccgtcatgcgaaaaatgccggaaccagcgtacaacaaaccgatagccacctgctggatctggtcagtcaacagcgcgtataacgccatgccggcggatgctcgccggcgataaatcatcagaattctcctgttcgggccagcgctctctttaatcgcaggttccctgtcccccttctttttcggcgcttcggcgccgtttttattccagaaaagcattaaaaacttttaaccagatctcattcctgctccgccggaggaattagcagggtattggtgatctggatcacgtttaaaactacgggttgataatataaaaacactgtttcaaaaatttaaaacacggagtttactttaatggcaagatatacggcttcagccccacaggggctgcagggaagaccgattttgttacgccatcagttagcctacggcggcgggaatttactgggaagcggcgcactggcgatcagcggcgcatggctgctctatttttatacaaccttctgtgggctgacgctgatcgaagcctcctttattttttccgtcgccagcattatcgacgcaattagtaatccgctgatgggctatctcaccgataactttggcaaaacgcggctgggtaaacgctttggtcgtcgccgtttctttttgttgattggcattccgctgatgatgttctacccgctgctgtgggtagaaggcctcggcttttggtactacctgtgcacctacgtcgtctttgaaatcatttatacctcgattatggtcccctatgaaacattggcgaccgaaatgaccgacgatttctcactgcgttcgaagcttaccggttataaagcgattttcggcaaactggccaactttctcgcggcatttatccccgggcagttcatcctgctttatggtaaagaatccgccaccccgttttttctcaccgggctgacctacggcgtcattcttatcgtggccatctcctgcctgtggtactgcagctgggagcgtccccgcgaagaggagataagcaagggagagaaaaagggactgttcaatactctgctcatgctggcgaaagatatgcgctcaacgttttacctgcgcgtattccgcaaacacctgggtatgtatctctgcggcttcggcgccgagtggctttttgcctcgatcttcacctactttgttatattcgtgctgcagcacgatccggcgatggtggccgggcttaacagtctgaactccatcctccagctggtatcaacggccctgtttattggcctgtgcgtgaagaaaggcttcagtaagccgtatattctggcgctgagcgtggttatctttgccgtgctgctctacacctcgctgtggttcttccacctgccttcaagcctggccaccgtcctgatgtttggcatcactgtgctgttcggtctcggcaccggcggcgtgtactatattccctggaccgtttacacctttttggcggatgtcgatgaaatctataccggccgtcgccgcgaagggatctatgcgggagccatgactttctccggtaaaattttgcgctcgattatcgtcttttccatgggggcgatcctcagcttctacggctttcagtcgaaagcgcatacgcagccagagagcgcggtcaccgcgattgcggtggtgttttgtgcgggcgtgattctgctggcgctggcagccattgtgttcagtaagcagatgaaactcgatcgcaaggcgcatctggtagtgctgcaggaagtcgcgcgtattaaagctggcggtaagatcgccgatatcgcaccggacgttcgccttgtcgttgaagatttagtcggccaccggtacgaagagtgctggggcaacagcaggctgtttaaagatacgcaggaaggcgccgttcaaaccgccgtctcccactaacaggtgataacgccccgctatcacaatgatggcggggctgacgccgctagtgcgcttcttcctgcggggtgaatttcagttcaatcagcgcgatggccttttgtaccgccctcagggtcaccgggtcagccgatgccgggtggctggcaaaatcgatggctttcagctgggtggtcattttttcgcgcacctcgacgggggcgatgacgtcgatgacgtcaaggatctgtttgataactaactggcaggcaaccacgtcagagaccagctcgtcgtgctcggtaagatgttgagacatttttcactccttttttcaggagcgtaatagtaccctaaatcccgggatataaaaaaacctgccgcagcaggtttttttatcagaacatagcgccaggcggtacgtctttgaaggttttgcagtagttttcgaacatgctcttcaggattttgcgcagtttcatggttgactccatttttgttatgcaggtgttaatgcctcgatggttataatatgacttacatcacaaaaatcaatctaaacgtgcgccaaatcacctattttttaccaaaataatttaatttttaaacaaaatgagcaggaccggatagtgaagagccgaacgctccggaccaatctgcgctctctttgctatggcagcgacacaataatgagtacacacacctcttccagggacgaccgttctttttcagcacctgcgctgctggtggctggcgccttttttatggagtttctcgacggcacggtgatagccaccgccctgcccgacatggcgaaagattttggcgtgacggcggtcgacctcaatatcgggattagcgcttatcttattacccttgcggttctgataccggccagcggctggatcgccgatcgttttggcgcgcggaaaatctttactctcgcgctggcgatttttaccctggcgtcggtattttgcgggctgtcgaccaacgtcgatgtgttcgtcgcgatgcgtattcttcaggggataggcggcgcgctgatggtgcccgttggccggctggcggtactacgtaccacaccgaagcaccagttgattaaggcgattgccaccctgacctggccggcgctggtcgcgcccattattggcccaccgctgggcggatttatcacccgctacgccagctggcactggatcttctttattaacgtgccgctcgggcttatcgctatcgccctgtcgctgcgtatcattccgaatattcgcgaagatgagcagcgccccttcgacctttccggctttgttgccacctcggtggcgatggttagcctggtcgccgccatggagctgctcggcgatcgccagcctctgggctggcagacgctggcgctgctggcgttgggcctgggctgcatgctcttcgcgctgcggcacttccgccgcaccagatggccgatggtgcgccttgatgcgctcaagatccccaccttccgggtcaccatgtacggcggttccctgttccgcgcctccattagcgccgtgccgtttctgctgccgctgcttttccaggtcggatttggtatggaccccttccactcggggctgctggtgctggccgtgttcgtcggcaacttaaccatcaagcccctcacaacgccgctgatccgctggctgggctttcgccgcctgctgctgattaacggcgcattaaacgttttgtcgctgctggcctgcgcttttttaacgccgcaaacgccggtttggctgatctttgtgattctctatctcggcggggtcttccgttctatccagtttaccggcatcagcacgctcgcgtttgccgatgtgccttccgcgcaaatgagctacgccaatactctgttcagcaccgcgtcacagctggccgtggggctgggcatcacgctcggcgcgataggtattcgtcttggggaaacgttcagcgaatggtttacgctttctcacctgccgggcatcagcttccgcctgtcgtttatttttatcgcgctgatttgcctggtcggcatgattgatagcctgcatctggccaaagaggcgggtagcagcgtatcgaacaaaaagaagtagccaaagaaaaggccagcagcgctggcctttagcatctcatcatgacgggatattaaccgacgatctggcgcacaaacgcttcgatctctttatcctggcagttctcaaagaagcactgctggaaacgagggccagaaacggcggttttcaccagctccggatcgatcgcgcgcagcgtatccagatagttttccttaactaccgccgcttttaccgcgttcaggatcccggcgttacgcacctgaggctctttacgctccggcggataaccttcaccgttgcggccggtaaaagctttttcaaagataaagcgtacgttcagctctgcgccccagccaaaacccttcgcaaacggcagagaaagcgcgttaccgttgttgatctgcgcaaacaggaaggcatccgcagggtcgatacagtagccgcataccacgccagggtgaatattcagcgacatcagcgcgccctgcccggtaccgcagccggtcaccacaaaatccaccgctttcgaattcagcaggatgctggccatgatccccagatgaatataggtcagatgatgatcgttttcatcgctcataccgacgttgtaaaccgggaagcctttttcttcagcaacggcgtttaactcattgaggatgatggcgtttttgttcgcctggctgttttccatcatcagtgcgattttcatgctttactctcctgaatgctctgcgggcactcccgcgatagttcgttagcgttgctatgaacaatactaccttacgaacatactttcaaattttatgaaaagttgttttataaattgcatctcgcctcacacttttgacttccgtccccggctggtacggcatccccccacccttacccacgtcaggctaatcccgccgcggccgccgggcgggtctattttcaccgctaaattaggcgcaacgatttttcgcatggaatattaaattaaaaccattctcattatttttaaatcgccaatgcgtgttattcccatttgcattattaataaatgattttattaatttactttttgcaaataaattaataacaaattatagtgagcgcacaataatccttaattctattttcccggagcagcctgatgctaaaaactgaaatgatcgacaagctgaatgcgcagatgaatctcgaactttattcctctctgctttatcaacaaatgagcgcctggtgcagctaccacagttttgaaggcgccgccgcgtttctgcgtcgccacgcgcaggaagaaatgacccatatgcagcgcctgttcgactatctgaccgataccggcagcctgccctgcatcacggctatcgcctcacctttcgccgaatatgcgtccctggatgagctatttcgcgtcacctacgaacatgaacagctgattacgcagaaaattaacgaactggcccatgcggcaatgaccagccaggattatccgacatttaatttcctgcagtggtacgttgctgagcagcacgaagaagagaaactgtttaaatccgttattgataaattgacccttgccggtaaaagcggtgaaggcctgtactttattgataaagagctggcaacgctcgatacacaaaattaataattacggcagcgacgcccggcgttcgctgccgcatgagtatcaatggcggcaaattttactttcgtgcgtattaaatccttcctcagcagcaataaatttgccttttttctgcaaaaacgccaccagctccgccgcgctcagattttccgccgagcaggtatggaatcgaacctctttcccaaaacggtcgataatcgccgcttccagcgtagcaacagtgtaagactcgcctgatgaaatcatcatttgcagcacttcgtgaccatgaatcgatggcataacccctcccgtaaaggccgaagaataaaccagccagagcggcggattcttgcgccagcgcagctttcgcgcaaacccctgacatcgtaaagttaacattacactccctgtaaccctcatttgacgaactcactgatttcacatactctgcgcggcataattaattgtgtattccgtgatggatagagaaaagcgtgaagaaccgcactctgggtagtattttaatcgttgccggcaccacaatcggcgcagggatgttagcgatgccgctggcctcggcgggcgtgggtttcggcgtaacgtttggtttgctgataacgctgtgggcgctgatgtgttataccgccttattgctgctggaagtgtatcagcacgtgccggctgatatgggactggggtcgctggccgcgcgctatctcggccgctacgggcagtgggctaccggtttttgcatgctgtttctgctgtacgctctcaccgccgcctatattagcggcgccggcgagctgctggcctccagcctcaaccagtggctggactggcgactgcctcctgcggcaggcgtcctgatttttaccgggatcggcgggacggtagtgtgtatcggaacctcgctggtcgatctttttaaccgctttctgttcagcgcaaaaattatctttctcgccattatgctggctctgctgctgccgcatattcaccaggtaaatttgttgacgctgccgctacagcagggactggctctgtcagcgattccagtgatttttacttcgtttggttttcacggcagcatacccagtattgtgagctatctgggcggggatattcgcaagctgcgtcgggtatttgtcatcgggagctttattcccctggtcgcctatattttctggcagctggcgacgctcggcagcattgactctcccgtctttaccgcgctgctggcaaaaaatgccgggcttaacgggctgctggaagctatccgcgaagtggtcgcctcaccgcacgttgagctggcggtgcatctgtttgccgatctggcgctggcgacgtcatttctcggcgtggcgcttgggttattcgactatctggccgatctgtttcaacgccagaacagcgccggtggacggatacagagcggcctgattacctttttgcccccgctggcgttcgcgctattttacccgcgtggcttcgtgatggcgttaggctatgcgggcgtcgcgctggccgtgctggcgctcatgctgcctgcgctgctggtcatgaagagccgcaaacagcatcctgatgcagcatggcgggtcgcgggaggctcagcggcgctgtggctcgtcctgctctgcgggatcggcatcgtcgcgatccagttcgcgattgccgcaggcttgctgcccgcggtggggtaaaaagaagggggccatattggccccttcttttatttggctaaacagcactgcttatatttcttaccgctgccgcacgggcaaggatcgttgcgccccaccttcgcctcattccggatgggctgctgaacttccgccggttgcgcgtgctcagtccagtagttataaagcgccagggcggcaggacgaattcgctcaacgctggcgacaaactcttccgcggataattcatcaagcgcctcaaatcgctcctcggtaccgtgcagggcaatcacgtccagctccgcctgcagctcagccggcaacgcggaccagtcgctcagtcccaccccgcgcatatagccgaagcaccactcttcaacaatcgtgagctcctgcccttcctcttcgcggctgccgaacatcggttcgaactgttcgggataatcgctcaagcgctcggcgatatcgctcatttgctgcagcgtcaggttcacaaaacgatcccgctcgcgatcgttggcccagcgcggcacgttatccgctccgccccagatagcaagcagccactgcgcgggttcaatctccgtcggcccggagagaatggccgtcagcagcccatcaagctcggcaacgtccatgatggtgccttctaccgcgtatttcgacaggatatcgtccagccattcaacttcgctttcgttcaggggtccagttttcataaacaggctcatcgtcgtaaaaaatggcgcttacagtagcggaaatagcgagagaaaaccacccggctactcaaggttcaggctgcgcagcgtctcagcaatctcacgaaaggcatccggcgaaagcggtagcaggggacgcggcaaacaatcctcaccgcacagaccgaggatcgtcgccgctgcggcagtgacccgcaggcttccgccatacttcctgtagagcgtccacagcggctccagcctggcgcttattgcctccgccagctgagcctgcccccgcgtcgcggccgccgtcagctctttggcgacgtacgggaacaggccgccgcacaccgaataccagacttcgcagccggcgttcaggccatcggccgcgcaggcgtctccgctaatcccgatcgtcacctcagccggtagctgccgccgcaggctctgaacgcgccgtgcgacgtcatttttagcggggcccggtattttaattgaagcgattcccggtagcgcagcgatcgcgcctttaagcgcatccgaggtcgtcacgtgcgtggtcacggggttatcgtaaacgcagacgggcacggagacttcgcgggtgacggtctggtaaaaagcaaaaatctcctcttccgtcaggggctgataggcgattgccggcaggagcagcgcgttggcgccagcccgctgcgcatcctctgccagtcgaaggacccgatcggtccccaacgcgccgatccctgccataagcggcaccgctccggcatgcgatttggcctgtcggataacctgtattctctgctcgcggctgagccaggcatagcttcccgtggaaccgagcacgccgagagcatcgacggcagattcggcgaggcgagtgacaatccgggcaaaagccgtttcatcaacgccatgctgatgtaacggagtcagaggaaaagcgcagaggccagtaaacatttcatccccacttattgagataatgatagattgccgacacagagtaacaacagatgcgggttttgtcctatgacaaaaatgaatgaggtggggctgaggttcaaaagcgaggttatggcaatacaaaaacaaaaaaccacccgtaggtggtttcacgacactgcttattgctttgattattctgctttatcccaatggtacccggagcgggacttgaacccgcacagcgcgaacgccgagggattttaaatcccttgtgtctaccgattccaccatccgggctcgggatagaaattggaggcgcgttccggagtcgaaccggactagacggatttgcaatccgctacataaccgctttgctaacgcgccttaatgcttgaacacccgctgatgccgatgttttaaactggagcgggaaacgagactcgaactcgcgaccccgaccttggcaaggtcgtgctctaccaactgagctattcccgcatcatcaagctaatttgctaattacttgattttgttatcgtctgtcagacagtgctgccgttcgatgcgttgcattctacttacctggcgcaatgagtcaacgatattttttaaaaccttgtgttgtttgctgaaaattgcgccgaaacgatcactgatcaagcaaatcgccgcgcgcagcgttcaaatactgcagcatggaccacagcgtcagcaccgccgccacgaggaacagaccaatccccgcccattcaacccagatatttgggcgccacagcatccacaccagcgcggccatttgcgccgtggttttgactttgcctatccatgacaccgccacgctgctgcgcttgcccagttcggccatccactcgcgcagcgcggagataataatttcacgcgcgatcatggtagcggccggtaacgtcacccaccaggtatggtaatgctcggcaaccagtaccatcgcaatagccaccatgactttatccgcgaccggatcgaggaaagcgccaaaacgcgtgctctgattccagcgacgcgccagataaccatcaaaccagtcggtcaccgctgcgacgaagaaaattagcgcacaggcaaaaggggcccaagtaaacggcagataaaacgccagtacaaagaacgggataagaatgacgcgaaacagagtaagcaacgtagggatattaaattgcatagtaacgggtaactatctgttgtaagtaaaaattagccctatgttgctacagagctcctaatgtttcaacgagtagaagatcttttctgccagaccgtgagatatacccggtacttgcgcaatttcttcgacgctggctttctgcaacccttgcagaccgcccatatatttaagcagcatctgtcggcgtttgggtccgactccctcaatggtttccagcgtgctggtgctttttacttttgcccgtttcttacggtggccggtaatggcgtgatcgtgcgactcgtcgcgaatatgctgaatcacatgcagcgcgggggagtccggcggcagactaaagccctcgccttccggttcaaagaacagcgtctccaggcccgctttacgatcgctgccttttgccacgcccaataacagagggtgacttttatcccacggcacgtccagctcggcaaaaaccgtcttcgcctgcccaagctggcctttaccgccgtcgatcaggataacatcgggaattttactctcttctattgccttaccgtagcgacgacgcaggacctgattcatcgccgcataatcatctcccggcgtgatgccggtaatattgtaacggcgatactctgcgcgcagcggtccgttgctatcaaaaaccacgcacgacgccaccgtctgttcgcccatggtatggctgatgtcaaagcattccatccgattgacggccggaagcttgagtaatgtcgccagcgcccgcaaacgttgcgtaatcgttgaatgctgggaaagcttggtggtcagcgccgtcgcggcgttcgtgcgcgccagcttcaggtaacgggcgcgatcgccgcggggtttggtctgtacgttaacccggcgcccggccagctctgagagcgaatccgccagcagggttttgtctcccaggttaaaatccagcaggatctcgcccggcagcgtccgcatctggctgccctgcaaataaaactgcccgacaaaggtttccaccacttcaccgagttcggtgccattcggcactttggggaaatagctgcggctaccaaggactttaccctggcggataaacagcacgtggacgcacgccatgccggcatcaaacgagacgccgataacatccagatcgtcaccggtattggagacgaactgtttctccgttacccgacgtacggcctgaatctggtcgcggatccgcgctgcctcttcaaattccagcgcctggctggccttttccatgcgggcaatcagctgagtcagtacctgatcgtctttgcccgccaggaacaggcgcacgtagtcgacctgctgggcatactcttcctcgctcaccagtccggcgacgcacggccccagacagcggccaatttgatactgcaggcaaggccgcgaacggttgcgatagacgctgttctcacactggcggatagggaagattttttgcagcagcgctaacgtctcgcgaaccgcgtagccgttggggaacgggccaaaatattcgcctttcgcatgcttcgccccacgatgcgtcgccaggcgaggatgcgtatcgccgctaaggaaaataaagggataggatttatcatcgcgcagcagcacgttgtaacgcggctggtatagtttgatgtagttatgctcaagcagcagcgcttccgtttcggtgtgggtcacggtaacgtcaatctgggcgataagcgccaccagcgcttcggttttacgcgaagccaggttgctgcgaaaatagctgctcagccgctttttcaggtctttcgctttgcctacatagataacagtcccgccagcgtcatacatgcgatagacgcccggctggctggttactgttttcaggaaagcttttgcatcaaaaacatcactcactgacttgctaacgactccgcattgcacaggccatggcgaattgccaggtgcgtcagctccacatcgccgtgtatgttcagtttactgaacatacgatagcggtagctgttcaccgtcttgggactcagattcaactgctctgagatctcgttgaccttctgacctttagtaatcattagcataatctgcaattctcgctcagacaaactggcaaacggcgactccgccttctccggttcaatctggcttagcgccatctgctgggcgatatcagaggcgatataacgctgacccgatgccacgcagcgaatcgcattcacaacctcctgcggcgcggcgcctttactgaggtagccagcagcgccggcctgcatgactttcgccggcagcgggttttccgtatgcacggtcagcattatcactttggcatcagcaacggaacgggcaatttttcgcgtagcctcaaggccaccgatacccggcatgttcatatccatcaggactacatcaacgggattcgcgcggcaccatttcacggcatcctcaccgcagcaggcctcgccggcaactttaatcccttttatatcttccagaatgcgtcgtatccctgcgcgcaccagttcgtggtcatcaacaagaaggacgttgatcaaaggaatattctccagaattagggataacgctactgatagcttatctcccacatattaccgggttttaacctaattttgaaagccaaaaaatgtgctgggaaagatttcttacgcaattatggaaatttgtctgcacacccgctggaaagccatacataacatagagttgtacaacagttattttttaacattcatcatacagattacgtaaaaacacaacacattgcgtaggcgataaatatgtgcctgaatatgtaacaattattaacacgaaaacggggcgtacgaaaaaattaacacgcttagatctcatgaatacgtattattcagtcaattaaatcattcaccactcggatgaaagaacagaaatcaagcactccttttttttcctttgcttgtggtatactgcgccgccttcacttttagtcatgcgcaattgcgcagaaagcaaccgaggatatagatgagcactccagatttttccactgcggaaaataaccaagaactggcacaggaagtttcgtgtctgaaagcaatgataacgctgatgctgcaggccatgggtcaggctgatgcaggccgcgtgattattaaaatggaaaagcaaatcgcgcagatggaagatgaggctcaggctgccgtattctccagcaccgttaagcaaattaagcaggcatatcgtcagtaatcaattaccggctgaaggtattactaacagccggtcttacgtctggcacgcagaacaacacatgagatcaaattaagcccgtcgctacggcatagcaggcgatttgggttttgtttggcgcgttgaattttcgctgcatatttttctgatggaaattgacggtattttctgagatagacagaatcattgccacctcagccgaggttttcccttccgccgtccatttcaaaatctccagttcacgtcgactaaatttcatttccggcggcataaccatctcgtcctccaggcgcaaaagcgtcagcaggctcaattcggttagcgttcttaagcgcatctccagctcatcttccgcaaagggtccctggctatggctggttcctgaaacggataagaatccctgagcatggttcggtagcgtcaggcactgcgtgacgcccttgcgtaatccatggtcgcgcgcgccgtcccataattccggtgtatcatggaatagcttgtcgttccatggcagatgcccacgaaggaaattctccttgcgcagcaccgggtcgatcgccagataattctcggcttgataatgcgccatccaggcctgaggataggtcgattgcagcgtcaccctgggccgagtaaaaggcacgggatgccgtacgcagagtgcgaagtagtcatattccagcccttttgcttcctgctggagaagatgataaaccccctctcctgcagaaacggactgaaattgttgcagcatttcccgccgccagctgaaaaaatcattgtccctcataactaaccaaataactcctgagtgataatcattattataaatacataaaactaacacataaaccctgcttatatgtataaaaaatggcagctaccgcatttattagactacgtccggcgaaagtaccggatacgttaaaaaattatgccaattgacgtggcacaaaaccttgacagatgtatcgtcgttgcttatgaccaccatccggacatactttttttgctgataaaccggttattcagcgctgcccggccgcatccgtcagacaagcctgagcgaatgcggccggcgcggggcgattactgcatcaggaatttttcgaggaactggcgggtacgcgcgtgctgaggattggcaaacagcgcttttgcttcaccctgttcaacgatacgcccctgatccataaaaatagcgcggtccgccacgtcgcgggcaaagctcatctcatgggtcacgatcaccatcgtgcgcctctcctgcgccagctggcgaatggtattgagtacctcccctaccagctcaggatctaatgccgacgttggctcatcaaacagaatgacatccggacgcatcgccagcgcgcgagcaatcgccacgcgctgctgctgcccgccggacaaacgacgcgggtagctattttctttaccggtaagcccaactttcgtcagcagttcacgcgcccgggcgatggactcatttttatcctcccctttaacgatgaccggcccttcgataatgttttccatcaccgtacgatgggggaaaagattaaaattctgaaacacaaagcccacgtgctgacgcaggcggcgaatggccgttttttgctggttgatgctgcgcccggcatcgatcgtcacgtcgcctacgcgaatcgtgccgctttccggctgctccaggagattaatactgcgcagcagcgtcgttttccccgaaccgctgggaccgataatcgccaccacttccccttgttgaacctcaaggtcgataccatgaagcaccgtctggccatggaattttttcaccaggtttttgacttcaatcgcactcattttggatctcgctcctggcggttcagctgattttcaaaatagttttgcagcgtggaaagcaccgttgccattacccagtagataagcgaagcggccaggtacatggtgaatacctccagcgtccgggaggtgatcagctgagcctgacggaacagttctggcacctggatagttgccgccagcgaggtatctttcaccaggctgataaaactgttggaaagcggcggtaacgccacgcgcgcggcctgaggaagaatcgcgcggcgcatagcctgccagcgcgtcataccaatactcgccgcggcctcccactgtcctttatcaatggatgcaatcgctgcgcgcagcgtttccgccgcgtaggccgccgtgtttaaagacaggccgatcatcgccgcgggaataggatccagctcaatgccgaactgcggcaagccgtaatagatcataaacagctgcgcaatcagcggcgttccgcgaaagatggagatgtacatccgcgccagccatttaatcggccagacgggcgacatgcgcatcagcgccagaataaaccccagcacgaggccaaaaaacatgccgccgatgctgagctgtagcgtaaataccgcgcccttcagcagaaaaggcgcggaatcaataaccagttggatactctcttgcattctatgtgttctgcattagatatgaggatgataggcgaacagcgcaggcgcgccgccggtgtgaacaaacagtattgggccttcatccttaaagcgcttctggctgataccatcaatcaatccggccatcgccttcccggtatacaccggatccagcaggataccttccagctgcgccagcagcttcaccgccgccatctcttcgtcgttcggtattccgtaacccggcgcaaagtactcatcccacagctgaataccggcctttgcctccagttccagactatttgccaccgcctgctgcagcgcagccacttttggcagctggtcagccacgctgcgcgatacggtcacgccgataagctcggcattgggcatcagctgctccagtcccacggcgaggccggcatgcgtaccggcgctgccggaggcgacgaccacggaggagagctcgaccgccccttcgcactgctgggcaatttccagcgcgctctccacatagcccagcgcgcccagcgcgttcgaaccgccaaccggaatcacgtacggacgatagccctgagcttcaatgcgggtcgccagcgcttccagctgagcattaggatcggtcagcgcgtcgcacatttcgacctgagtattaaacaggtcaagcagcaggcggttaccgttggtcaggtagttctcagcccgggtacccattggattctccagtagcgccacgcagtgcaggcccagcttagccgccaccgccgccgtctggcgcacatggttggactggatagctccggcggtaatcagggtatccgccccttctcgcagcgcttcggcagccagaaattcaagcttacgtagcttgttgccccccatcgcaagcggggtcacatcatcgcgcttgataaaaatttcgcggccaaggtaatcggacaagcgcggcagatattccagcggcgtcggcgcgccaatcagttccagacgcgggaatagggttaaattttgcagtgacataagacctcctgactgaattatccttgattatgcacgctgtgacgcgcgaaataaaaaaaggcgctatcaggagcgccttttttcaccgctggccgttacttcgtgacgtcagcgccaaaccatttttccgacagcgccttcaggctgccgtctttttgcatatccgcaatggcgccatcaaccgctttcagcaggtcttcattacctttgcgcagcgcaacgccggattcctggcgagagaaggcttcaccggtgacggcaagggtgttaccggttttcttcaccagatccagcgctgccagacggtcaaccaggatggcgtcaattcgccctacgcgcagatcctggtatttcgtcgggtcatcatcataagtccgaatgtcgacgccctgtacgttctggcgcagccactcttcgtagttggtccccaggccgacgccaactttcttacctttcaggtcggctgcggttttaatcacgccttcgttaccttttttcaccagcgcctggatcccggaaacggtgtacggcgtcgagaagtcatatttttgcttacgctgatcggaaatagtgacctggtttatcaccacatcgatacgtttagagtccagcgaagccagcatgccgtcccatttcgtgggtttaaggtcagccttcacgcccagatgtttcgccagttcattagcaaaatccacctcgaagccggtcagcttaccgtcatctccctgatagctgaatggcggatatgtcccttccagacccacgcgtagcgtgccgcgttctttaacctgattaagcagattttcagcagcaaaagtttttacgctgacgccggtcattaatacgacggccattgcgcccatcagcgcctgacgacccagaagtgctaatttcatagatacccctaacagagtgatattttgctgtagtgtaaggcgtttaaccttagtcaccaacatcgatacgctacatcttattccaaattattatatatgatgccttttagggcatagtgaaaacgtatcgaaaacatctccattttgctggatatctctcatacttcaatggtcagcttgatgacgtatggagcatggaagatgaaaaaccccacgttactgcagtgctttcactggtactaccccaccggcggcgaattatggcgtgaagtcgaagccctggcgccaaacctcaacgaaatcggcattaacatgatttggttgcctcctgcctacaaaggcgcctccggcggctactctgtcggttatgattgctacgatctgtttgacctcggcgaattcgaccagaaggggtctgtcgccacgaaatatggcgataaaacccagctactggccgccatatccgccctgcgccagcacgatatcgccgtactccttgacgtcgtggtcaaccataaaatgggcgcggatgaaaaagagccggtacgtattcagcgtgttgatcaaaacgaccgcacgcaaatcgccgaggagattgtggaatgtgaagcctggacgcgctacaccttcccggtacgcgccggcaaatactctgaattcatctgggattataagtgctttagcggcatcgaccatattgagaatcctgatgaagatggcgtgtttaaaatcgtcaacgactataccggcgaaggatggaacgatcaggttgatgatgaaatgggtaacttcgactacctgatgggtgaaaatatcgattttcgcaatcgagcggtgacagaggagattaagtactgggcccgctgggtgatggaacaaaccggctgcgatggcttccgcctcgatgcggttaaacatatccccgcctggttttataaagagtggatcgaccacgtccaggaggtggcgacaaagccgctgtttattgtggcggaatactggtcgcatgaagtcgataagctccagcagtatatcgacatggttgacggtaagacgatgctctttgacgcgccgctgcagatgaaattccatgaagcctcgcggcagggacgcgactatgacatgagccagatttttagcggtacgctggtggaagccgacccgttccacgccgtaaccctggtgaccaaccatgatacccaaccgctgcaggcgctggaggcgccggttgaggcctggttcaaaccgctggcttatgcgctcattttgttacgtgaaaacggcgttccgtccgtcttttatgccgacctgttcggcgccagctacgaagataccggcgacgacggcgagacctacgccgttgagatgccggttatcgagcagttacacgaactgatcgatgcccgtcagcgttttgctcacggcgtacaaacgctgtggttcgatcatccgaactgtatcgctttcagccgcagcggcaccgaggaggatccgggctgcgtggtggtgctttccaacggtgacgacggagaaaaaacgcttcctctgggggaaaactaccgtaataaacgctggcgcgattttctcggcaaccgcgaggaagtgattgaaactgacgatgaaggaaacggggtttttacctgtaacggcggcagcgtcagcgtctgggttatcgaagaggtgctataaaatacagagaaacgccgcgggctgagaagggtttcagcccgcaaaaagcttattgcccgcttttatcagccgaggcctttttccatgcctgttcacactccggggtaagacgatccacccgcttgagcgtcatccggtcgtagctcagggtatcgccttcgcgctcaatcggataaacatccaacgcggaggtgacgttataaaccgcatcatcacgcttcattattttacccggcaggacgataacccgctgccactggcgacagtcaagggtattgccctctttggtgacgatcaggctcgcaatcgcatccgggctcatcatttcactctgcgggccggccgattgccagtatccttccagcccagccggcgctggcgctttaaccacctcgctgtagctatcaacctgaacacacccggccagagccagcagagcgccagcaaacactatctttttcatcatccatcccacaaaccgataaaaaaacattgtggcattaaagcgttaagctcgccacccttcgcgattcggcaacagcgcagcagggcgaacgtcgggctcacccaatatggtaaaaaatagccttcgaatgttaagttattctaacccatcgaataaaacccataaatcagcagatgttattttaaccattcaatataaggataatcctattttaaaaagccgctaaaatggcaaacttatatatgacgggtatttattgtttttatttcctccacatagcgatttgtagcctttactttgagaatattcctggcaaattatggggcttattacggaatagttcaggctgcctaatggttccgcggcagcagtcgttttttattgctaacaaaatggacttcatcgcgcttgtcagcgaggaataaattatcgttacgtgttgattgaggatgggtcatgtcaacgattatcatggatttgtgcagcttcacccggctgggattaaccgggtacctgacgggcagaggggtaaggaagcgcgatatcactgaagtacacagtgcgcagagcctgaaggctctctgcgagactagccgcccgacggtggtatttatcaacgaagactgctttattcatcatgaagagagcaaccagcttatccggcaaatcattagccagtatcctgcgacgctatttgttatctttatgtcgctggcgaatatacatttcgatcactacctgctggtgcgcaaaaacttacttatctgctctaaatcactaaccgaaaaagacctggacgacatccttgccatccgcctgaaatatgagaactatcgtcccacccggattaatatccccacgctgtccttaagccagaccgaatcaaatatgctgcagatgtggatggccgggcacggaacctcgcacatatcagcgcagatgaacattaaggccaaaaccgtctcatcgcataagggcaatattaaaaagaaaattcatacccacaacaaacaggtgatttatcatatcgtacgactggctgaaaacatcacctccggaattcacgtcaacctgcgttgaaagacgctggcggccgctgccgccagttcacttgaggcaaatcactcgtcccgctcaacgaaaataccgtcgggatgaccgttctcattaaaaaaccagatcccgagcgggtaatcttccagcgaaaccagatacattacgccttcgctaaacgactctatcgccagtacaacacccgatcgacgtgggccaccatcggtcttcaccgtgacacgatcgtttacctgcataactcatctcctctatttttgagccagtgtagaacaaaactgccgatcgcgcagtgtcctgcccggtaactgctgtttttgtagaccgactatacttaaatagccctgtctgagttaagcgaggtacccgcaatgaaaaccgccaaagaaaatcaaggcgcaggaagcgtagacgttgacgccctgctggcggcgattaatgaaatcagcgaaagtgaagttcagcgtacgcaagacgatccccaccacgtcagtattgatggccggggttaccacacctggcgcgagctggctgaggcctttgagctcgatatccatgatttcagcatcacggaagccaaccgctgaattctgagcgaaaaaaatcccgactcgcaggagtcgggatgaagcttgctaatgcaagaagcacttgaaaattcgttacaccaggatatccgatgcgctacaaacattaccctcaattattttgcatgacaacaaacattcatgaagcaaattattgaaaaacgtggcttagcttccccttcacgctggcaacgctcgccaggcaaggactgcggacatttgttcttccacgaacgtccgatcgccgccaaacgttttttaagaataatctcactaaaataaccgtagtgaatgatttcaattcaatttatttacatcaggaattaattttacccttcggcgcagacccgatcgcgtccgttttgcttggccagatacaggcgatgatcggcaacagactgcaaattttcaaagttatactcacccgaatcctcgctacagctcaccccaaacgaagcggtaatacgcaaagacatgctgttacccagcaaaatttcgcggctattgatccggatacggatccgttcagcaatcgccttcgcttcttttaacgcggtattcggcagcacaatacaaaactcctccccgccaactctccccgcaagatcgccttgccgaatatggctggcgatagtactggccaccagcgacagcacgcgatcgcccgcgtgatggccgtacaggtcgttaacgcttttgaaataatccagatcgagctgaatcaccgcaacgggccgctttaaacgctcgctcaggcgagtttctgcagtggcgcgttcaaacagcgcgccgcggtttaataggcgggttaacgcatcgtgccaggcctgccactccagggaggtctgcagcacgctcatattgcgcaccattcggcggatcaccagccaggagatcatcaacatcagcgtgaacatgagccacatcagcattaaagcaatggtgatgctgccaaagtcaccgcggacgccttcccggatcgtatggatacggatcagtaccccatcaaaattacgtaagttttcccagctgatataacgcgtgaccaggcgaatccccccctgattctcatgagaagacgcgcggctcagcatctcctgttcccgcggcgacagcagcgtcagtacgttgcccggcgcggaagaggcaatcaaattgagctgattatcgtaaagctggtactcgccctcttcgcccgttttaatcgcattgaccagaaacgttttcatctcttgtaccgagaaatccattgccagtacgccgagccaatagcgctggaaatcaagcggaatagacgccgtcaccacctgcatttcgcgctgcgacgcctcatcgggaaaggtttgccacacgatgccgcgagcaggattattcctctgcgtttgccgggtaaaccagggggcgcttgtcgcccgcgaatacagcgccagcgcctgtgtcgcattcttcagcggctcggtggtggtaaaaaagccattgcgcgacacgtacagcatgcgtttcgcaaaaccacggttgttattagccagacgcagcatatagcccagctcaagggtggccatgagctcattgccggaaaaggaattatcgcgagagagaagcgcgtcgccgtcgacaaatgcatcggcaacgccatagaccggcagcgtccgccggttatgaatctcaacggaccagaggggatcatgccgcttttttaaataatcctcttccgccttgcgcaatacgacaaaatccagcggcgttcccagcgccgattgcatcccgttacgaaaaaaaatcattctgtcgatattaaactgcagcaggctgtcgaactcatgggaaacgttttcaagattattgcgctggtttgcgacgtaggcttcttccaggaccttgatctcacgccatatcaacaacgtggaaaagcagaagacgataaaaaaacagaggttaaccacatatccggggcttaaaatctggcgcaattttttcacccacatcagcttatccatcgttttctcgcagcacggttaaagaagcaaacgtcatccacgctccctgttcgtaaaacaaccattaatatgaaagcgcccgacgaatgccgggcgctgataacgggtcaggagcggttcagcttccctccccctccgcgaataagttcatcttcacgaaacgcctcgcgcttaacgccgtaaccgtcataccagcgacattcaaccatgccgttggcgaacccggtaacgaccattcgggggccaccgcttttacgcctgacttcatcactgaccaacaagaccatttttgcctccggtatcaggaagaaacagatttaacatagacgaagctgaaccactttgcatgaccaggagcacatttactttgccggacgacgcagagcggcaatcgctttcactccagccagcacgatggcgccaatgatgaatcccagcaccaggttggcgcccgtgggcagcagcgaggcaatgaccccgttctgcccatgggccagattttcaatagtgtggtgcagtggcgcaataccgtggactacaataccgccgcccaccaggaacatcgccagagtgccaacaatggacaacactttcatcagacggggcgcgatcgccaacaacgccttgcctgtccactgcgccagcgagctggttttctccaccagccagtagcccatatcatccagcttgacgatgatccccaccagaccgtagacccccaccgtcaccagaagcgcgatgccggataaaatcaggatctgattcaacaacggcgcttccgccacaatcccaagcgtgatggcgacaatttcagccgacaaaataaaatcggtgcgtatcgcccctttcactttatcccgttcaaaagccatagggtcctggttcgccagggcctcaagccgccgctggcgaacctgcggatcctccttgtgtttgcgcgcctgcaggctgtgcagcaccttctcgacgccttcaaagcacagaaacgcgccccccagcatcagcagcggcgtaatcgcccacggaataaaagcgctgatcaacaacgccagcggcaccaggatgactttattgatcaatgagcctttggctacgccccagactaccggcagttcgcggttggcccgcacgccggtgacctgttgagcattaagcgagagatcgtctcccaatacgcctgccgttttttttgctgccagtttccccatgaccgaaatatcatcgagtaacgtggcaatatcatccaataaggttaatagactacttcccgccaaaattgcattccttcatttatgattgttcctcctgaagtatgaagcaaaagcgctttttcgcccaccggtgtccatagtcaacaaaaatttaaccatagcaggcgaattaaagcgctcgccagcacgatagttttcacgtttactatacgtcccctttctatctctgcaccgtcgtgaggaagtatgtctacccgtcagctgttaccgctcatcggggcgctgtttgcgctgtatatcatctggggttccacctatttcgctatcgccgtcggcgtcgccagctggcctccgctgatgatggctggcgtgcgttttctttccgcgggcgcggtgctgaccgcctggctgctggcaaccggtcataagctgcctgcgcgaaagccgctgcttaacgcggcgctgattggtgtgctgctgctggcggtaggtaatggctttgtgacgctcgccgaacatcagcacgtgccttcaggcattgcggcggtcatggtcgcgacggtgccgctgttcaccctgtgttttagccgcttttttggtattgcgacccgtaagcttgagtggttaggtatcgctattggcctcgcggggatcgtactgctcaacagcggcggcaacctgaacggtaatccctggggcgcgctgctgatacttatcggttcaatgagctgggcttttggttccgtctacggctcgcgaatcgagcttccaacggggatgatggcgggcgccattgagatgctggcggctggcgtcgtgctgatgattgcctccacgctaaccggagaaaaattaacccagatgccgtcgtggtccggtatttttgccgtcgcctatctggctatcttcggttcgcttatcgccattaacgcgtatatgtatttgattcgtaacgtaacaccggcggtagcgaccagctatgcctacgtaaacccggtggtcgccgtactgctgggaaccggttttgccggagaaagcttatctgccgtagagtggctggcgctcgggatcatcatcttcgcggtcgttctggtgacgctcggcaaatacctgctcccggcgcgtcgtgaaattacatcctgtagggcggagaagtaacgtccagcaaacctatgccctgagtatcgatctgcgcgcactgaccgccgccgcagatccactcttccagccgttcgcccagcgcgtcgtcattgagtttctttcgcccgcgcagcgcgcactcccagactaccagcacccgccatccctgctccgccagtcgcccgatatcccggcgatcgcgcgccacgtttttggctattttatccagccagaacgcggttcttgtggcgggaaccttgaacagatagcaatcatgatgatgccagaagcagccgtgggtaaagataacgcactgatagtccgccacgacaaaatccgggcggccgggcagcgcggcatcctgtacggtaaaagagaatccggcccccgccagtagcccagccagccgtttctctattgccgtatcgcgggtgcctatcgcgcgcatgtttttactgcgggtggctttatcgtgaacgtcggccatggttaatctcttgctcacgcctggcaaccgcttgtgcaatacgcggcgccagcagcttcgccaccgccgcaaataccggcacgacgacggaattgccaaactggcgataggcctgggtatccgagaccggaatacggaagcgatatccctgcggcgtctcaaaccccataagcctcgcgcactcgcggggcgtcagcctgcgcggacgacgaagctggttttcagggtcatcaaaatgcttttcgcccagaggccgatcccagccccggtcaatgaggatttccgcgccatctttgtaatagcgggcagagagcgttcgcgccacgctgtgcggattcgttgggtcgacgagcccgtagccaaaaccgttcccccgctcctggtgcttacgcgcgtagcgatagagatacttccacagcaccctggtgagaataaatttgtcgtcaaccgcgggctccagcagctcgccaaaggtcggccgacgagtgggataaagagtggcgatatcgcgcagggtaaatccctcatgcagctggagatcgcgccggaaacccaccagcacaatacgctcccggtgctggggtaaaaaataacgcccgtcgatgactttagggtcatccgccccggtatgcgccgcgtcggcaacctcgtaccccagctcatccagcgtctgcataatgatacgaaacgtccgcccccgatcgtgactcttcaggtttttgacgttctccagaacaaaaatcggcggctgacgggcggcgataatcctgaccacgtcaaaaaacagcgttccctgcgtttcgcaggcaaagccgtgagcgcgaccaagggcattcttcttcgacacgccggcgagagaaaacggctggcaggggaagccggccagtaaaacgtcatgctgcgggatagtctggcgtatatgctgcgcggcttcttcctcgctcacctcagggagatggctcaaagtcacatcgcggatatcttcattgaaacgatgctgctcaggatcgcagtaccagttggctttataggtgcgcaccgcatgtttattccattcgctggtaaacacgcattgcccgccaatcgcttcaaaaccgtggcgaataccgccgataccggcaaacagatcgacgaagcggaacccataatgcggatgatgcaccggcggctccggcaggagcgtgcgcaggtgggcctgctcctggcgggtgatacgacctgccgcgcgcgctaccgtcgcaacgcgcttgaggatagccgggctccagtgctgctcgccgacggcaattaactgcgcgaccaccgttttgacatcgtatatcgccattagctgacgcaatagcgcctgcgcgtcttctccggtatgttcaaccttcaaagacgggggattttccttggataaattttgcgccataacctcaaccagcccgactatttttgcagaggttaccataaatagcgcggccagttttatgctagtggatcaaagcgctgcaaaacctcagcatcaagcgccatcggctctccgcgaagctctgcgctcagcttggccataaactgcaccagaaaacgcgcattgtgcaccgccattgccctgcccttttctgtctgcatcgttttcggtaaacgcagcagcttgcactggaagtgatccagcgcatacgttttgtcatccaattcccgccggtcagcaaagggatcgcgggcatcaaacaagctattgttcagcgcgccggacaccgcaaatacgcgcgccagccctatagcccccagcgcctcaaggcgatcggcatcctggacgattttcgcttcttcgctttgcggagcaatcgccgcgctaaaactgtgggcttcaatcgcgtgtaaaaccgccgcgtagcgttccggggggaaatcaggaaaagcggactgaaggatagccagcgttttttccgccgccatcgcagaagaacggcttcgctcaggatggtttttcgccaggctgacaatgtcatgaaagtagcaggcagtgaggatcaccaggcggtcggcagcggtctcttcggccaactgctgcgcggtagcccatacccggcggaagtgtgaaatatcgtgagcagcatcctcttgcccgtgatgttggcttagccaggcttcaaatcgttgctgccagtgataaaggtccatgcgcgttcctttgatataaggccagcaacgagcatagcaattttaatcgtgatgttcatacatctgcggattaggacgcgtgtaccaggcgatcgccccgagaagggtcccgacaatacccaacacaaggaaacccagcagcgcgccaatccattttcctgccgttgagccgagctcgccgtcaatcgtggcgccgggcacgctttcaatcttccccacaacccaccagtaacgcgccatcgcccacaggaaatagccgcaaaaggcgtaaaatgcccacagcgccagtttcccgccaggacttcttttcgctttatcttccattcatttgttctccatctacttcacaacccctatcacccaccggtaaaaatgtgatatcggtcacattatatagcgaaaacgcctgcaaaacagcagatccctctctcacgggttcgattttgcgccctggtcgggagcacgaccctatcgcccgctacatatagtcaatgaattcatttcgtttttaaataatacaaattaatgaatataactgaatttctgagactatatttacccccaccctccctgcctcaaatatcatatttgcttgctcgctcttcgctttatccttacaaaaaagcggcggcaatcagatattgagaaataaacatataatatataaatacaatctaacaatacatagagcacatgaagcttatggacaacaaaaatcatacaaaaccaatcataactcaatgttattaaaagacataaatacaataaataaattttcaaacatcaatacaatttaaatataatgaatagaacggaaacattttgtaatattagatataatttacttacatttttaatttaaagaaaaatgaacttcgtcgttagtatttaatagtcaccccggaaggaatgacacaattcatattaattataatcaaaagggaatgtataatgaaaagaaaagtactggcaattctggttccagctttattagttgctggcgcggctaatgcagcagaaatctataataagaacggcaacaaactggatttctacggcaaaatggttggcgaacacatcatgacccatgatggcggcaacaacaactctgacgatacctcctatgcgcgtttcggcgtcaaaggcgagacccagattagcactgaactgaccggctatggccagtttgaatacaacatcaaagcggacaaaccggaaggtcagcagggcagcgctactcgtttagcattcgccggtctgaaattcagcgactacggttcattcgattatggtcgtaactacggcgtggtttatgacgcggcgggttacactgatatgctcgttgagtggggtggtgacggtctggtttacaccgataacttcatgaccggccgtaccaacggcgtagcaacctaccgtaacaccgacttcttcggcatggtggatggcctgaactttgctctgcagtatcagggtaaaaacaacgataccaccgcgaaaaaatcaaacggcgacggttttggtttctccgttaactacaactttgacggcttcggtttcgttggcgcctacagcaactctgaccgtactgatgaacaagctgcggaccgcagaggcgaaaaagctgaagtctggaacctggcggctaaatacgatgcaaatagtctgtatgcatcagtcatgtacggtgaatcccgtaacatgactccgctggagaaaacgacttttggcagctttgccaatcacacccagaacatcgaagccgttgttcagtatcagtttgattttggcctgcgtccatccctgggctatgtctacgcgaaaggtaaagacctgggcgccaaagaagacactaatgcggatatcatgaactacgttgaattgggtgcatggtactatttcaacaaaaacttcaacgtttacaccgcatacaaattcaatctgatcgatgatgaagacgcggcggtaagtggcgcagccaccgacgatcagttcgccgtgggtatcacctaccagttctaagactgcctggttaatctaaagcccgcctcgtgcgggttttttcgtttttaccaacggctcctcgtcctgcatcgcgaatatcgctacacggcagaaagatgaggcgttgcgatctattaacgattgctccgcagtaaatcaggaagatgataattgtagccccttcgaggcgtgatatcctttttgacgggagacgttggaagaaaattacgtcatcatgcaaatgatataattaacaataaaaacaaaaaactcacaatattttcactccccgccctcagccctatccgggagatttaaactgttttttcttcttgagcgcagcaacgtccgcgcataaataccgtaacagtagacaagttaataccgcagctctgcctggtatgaccgcaccagagctcacgcctccgattgctttccggcttttatatcgccgccattcggcattatcatatccatacaagctcggccagagaaacgtaaaacaatacccgccgaggaatatgtctacggtaataaaaacccgggttgacaccgaccacgagttggcgtcaaatacttatatttcaggggctcattgcttatatcgaccgtgcattcagtctcttaaccgcccctttacaaaattgatgtaaatcaacaaatgattaattacaccttgaaaaaaaatatatccagagaagcggtcaggtacattatcgttggcctggcaaatacagccattacggcagttgttatatttggcctgatgcatgtcggcgtgggagtctacccttcaaatgcaacaggttatgtcgctggcattattttcagttttgttatgaatgcgaagttcactttctcaacgacattgagtcccctgagatttatcaaattcgtatccacatgcgctttttgttacattttaaatttaatagcaatgaaagtttttttcattgtcatacctaatgctatttatacagcgcaagttgtaggcatggtgatttacacaacagctggttttattctaaacaaatactggtcaatgaaatgaaagaaattaatataaaccacacgaggagcaaaataccttcgttagcaatcgttgttccttgttataatgaaaaagaggcctttccatactgcctggaggggcttaccacggtattacaaaacctccttgcaaaagaaaaaatcgctcgaaatagttatatcctctttgtcgatgatggcagtaaagacaacacctgggaacaaattaaatccacatcacaggaaaagtcattcgtccgcggtctgaaattatcaaggaaccggggccatcagatcgccctgctggcggggttggcaaacgcggatacggacgttaccgtaagtattgatgcagacttacaggatgatataggttgcattgagaaaatgatcgacaaatatcatgaggggtttgagattgtttatggcgtacgcgacaacaggagtagtgactcagtattcaaaagggcaacagccaataaattttattctctgatgtcagggctgggtgtcaatcaggttcctaaccatgcggacttccggcttcttagccgtacagcgttgacagcattaaaagattttaaagaacaaaatttatatttaagggggctaattccgctgttgggttataagtccagcagcgtttattatagcagagatgaaagggttgcaggcgaatcaaaataccccttaaaaaagatggtagcactggcgttagaaggaataacgtctctgacaattaccccattacgtatgatcgccgccgctggggttgccacatgccttctatcttcactagctgcaatctatgccttcattgagaagctcctgggaaataccgttgcgggttggacatctgtaatgattgcgattttcttccttggcggtgtccagatgctttctttggggataattggcgaatacgttgggaaaatatatatggaatccaaaaatcggcccaaatattttatcgaagaggtagcaaaacacgaaatgagaggcgagcaatgaacactgaggacgaacggatgacgtcttacactaaaaaaattattgcaatgctttacctcgcggcaattttcttagtttatagcccaacgattatatttagttacgcattttcagatgactggtcgacactttccgatgttttttcagggaagggttctccgtttcaatgggatatgcaatccggcagacccttgtatgccgttgccagacgacttgcctttacgctagttcacaatctcgatgaccttgcctatcttagattttttaccgtaatatcggcatttgttttttgctttttccttttttcatttatagaaaaaagaaacatattcgagcgtaagataacaacaatcgcattccctttactaatatgcctgacgcccgcagtacaggtttataattcctgggcgacatgtttcccttttgtactctccatactccttgccggaataagttatgcgacattaaaacccatcaataagaaaacgacaattataagatttgcagcatccgtcattattttatggtttgcctttgccatatatcaaccaacggcgatggcatttttatttttcgtcatgcttgataactgtctgaaaaaagacaaaccattttccatcaacattgttctaatcagtggcgcagttttatttatcggcatgcttggtagcctgctgttttcaaaatttgtacctgtatggttatatggcagctcaattgcacgtgccgagttaactaataatacacttgagaaattacgatggtttataaaagaaccgttgattaacgctatcaacaactttaatataactccaggcacctttttcacaacgctctcattaataatttgcgcaataggtttactttcaataataaaaggcaaatcaggcccgattaaggttctcatgtttattatcatggggattggcgcctactctccaaacttattagtcaaggaaaactgggctgcatataggtcactgatagcactggaattcttcacatgcgctcttattattattgggttagatgccttgacaagcaaactcaacatagcaaaaaaagcgctacccatattgacggtattcgcgatgatcgctgcatcatacaatatctttaatggtttcattatcccacaaaaatcggagttaaacgcattagccagcgcgctttcctacaaggtggggaaaacatttacaggggatgttctttttgacattcaagatcctgcctataacgcctttactaaaacacaacgttatgacgagtttggcaatatttcccttgcggctccctgggctatcaaggggatggcggagcaaatcttaattagcaagtcaatgcatttcaggcttcccgataatgttattctgacggcaaaggagcaatgcgccactgattgcatcattataaaaacgggcgatgcgatgaggagttcaacctccaactactgaaacttttcgccaccacgcatacctgtatatgatcccgcgccagatccgcgcgggatagtttttatcccggcagctcgggcctgggtcataagtctctctatcacctcacagcgctcgacagtcaaccatgcttccagtgcttttctgagttcgcttcttttcatccatcatcccttctcttgaggatatccttacagaatccgagtgtagcaagggcagttaactgctttgttatctgtgatacaagacgggctaagctattgtaaagagtgtgagcttgtgaactaaagaggataaaagtggatgccccgcaagaggcaacatggtaaaaaagacagcgttagaggcgagaaaacagagcgatagaaagaaattttaatgcagggattcgtgcagggcaaaatcaaaagcgctttgcgactgactgattttgttgaatagtggcggagagagggggatttgaacccccggtagagttgcccctactccggttttcgagaccggtccgttcagccgctccggcatctctccgctgttgaggttgctataatgccaggttctttggcattttaatagttcctgtctctttaattcagttcaagtgacgactttgcgagcaatatgatgtttaaatggccctggaaagtagatgaagagtccggcaacgcggaaatcccctgggaaaaggcgcttgccatccctgtattagccaacctctccgaccatgagcagcagcagctggcgcaaatggcatcccgctttttgcaacagaagcgtctggttgcattacaggggctggagctcactcccctacagagcgctcgtatcgcgctcctgttttgcctgccggttctcgaactgggcatcgagtggttagatggttttcacgaagtgcttatctaccctgcccccttcgttgtcgacgacgaatgggaagatgatatcggcctggtgcatagccagcgaatcgtgcaatcagggcaaagctggcagcaagggcccattgttctaaactggctggacattcaggactccttcgacgcttccggtttcaatctgattattcatgaagtggcgcataagctggatacccgcaatggcgatcgcgcgagcggcgtgccgtttatccccctgcgcgaggtggctggctgggaacacgatctccatgctgccatgaacaatattcaggatgagattgatctggtcggtgaaagcgccgccagtattgacgcctacgcggccaccgatcctggcgaatgtttcgccgtactctctgagtacttctttagcgcgccagagctgttcgccccgcgttttcccgcgctttggcagcgtttttgcctgttctatcgccaggatccgctggagagattacgtgagaataccccaccggatgacggcaatagcccggcagtacactaaaacaacgacctgcactaaatttagccatttgaatcagcaagttaaatttaatgttgacacaaaaatccgagaccagtagtattcgccccgttcacacaattcctctgtagttcagtcggtagaacggcggactgttaatccgtatgtcactggttcgagtccagtcagaggagccaaatttgaaaagcctgcttttgaagcgggcttttttattttcattttctcctccacatcggaagaattttgaggtcaagcggattcgaggacggcgtgcccccaatgtcccttaacgcctcaaaatcagaaagttagtaccatccgaaaaacgcttctaatagcatcctgccgccacgcacttatcctggtcaaacgcgcgtcatggcttcatcacgatccggccaagcggtttcgctgtctccgcaaattcgtgggccgcggcagcgttagccagggggaagatgcgatcaatgacaaccgtgacgcgccctgctgctacagcctgcagcatctcgtccacgcttgttcgaactccatgtcttgcaaaaagaggtcccatgaatacccccatgagcgtctggttagactgcattgccggccataagtcgacagtcagactgccgccaccggcattaccgacgaagaccagacgtccttccggagcgagtgcagaaagcgaaacaggcaacgtcgttcccaccggatcgatgacgagatcaacaccggtgccatgggtgtactgtcggacactgtccacgatgttatcctttgtacgatccacaacatgatcggcaccaagttcacgcaaccgacctcgtcgctgcgttccgcttaccacggcgatgaccgttgcgcctgcttgtgaggcaagctgaacggccgcgagccccacgccacctgctgcggcctgaataagaacggtttctccctgccggagcatgcctcgcgtgaaaaggcaatgatgcgcggtaccaaatgaaatcggcaatgccgccgcttctgccattcccaccccatcgggtataagccaggtgcgttccgcgggcacggcccaacgttccgcatgcgatccctgcatgtgaaaagcagcgactctgtccccaaccgtacggcttcggactttcgatccgacggcaacaactgtgcccgcggccgcgtagccaccgatccataaaggaagcggcggcggcgttgaacggcggttaatcagatcgccaccctcaatcgagatagcctcgacagaaatcaggatgtcgtcgggccctgtgaccggctccgggacatcgacatatttcaggacgccgggagcgccttccacgtcatagaccgctgctttcataaattttcctctgtcttatctttcgactggcggaaaaacccgtcacgcgcagggcagcctggcaatcaccttaatctcaaactggaatccgtaaagccacgtcacgccgatcccggtcaacgtagggtaaggcgcttccccccaatattctggcaggatactccagatagcgtcgagatttgactcggggtcgacaacaaagagggtcacgtcaaccacgtcaccgaacgtgcagcccgcagccgcgaggacagcattaaggttatcgaaggccaacctgacctgcgctttcagttcgggctctggcgaaccatcctcgcggctaccaacctgcccggaagcgaacagaaaaccgttggatttgatggccggtgaatagcgattgcgctcatagagcgcctgccgaccggtggggaaaactgcatcgcgtgccgtcatgtttgtacctctgcaatggggcgaaatcagcccggtgaacataaggacactttacaagtgcaggatcgggcggataaacaagcgactttgtccatcattgtttgtaatatccaaacaatcggcgaaaagggaggattaggaatggatcgtttcgatgcgatgcgcgcctttgctcgcgtggtggaagcagggagcttcacaaaggctgcccaaacgcttcatatgagtaaaaccacggtgacgcagctcattcagcagctggaagcgcgcctgcgcgtcaagttgctccatcgcaccacccgcaggctcggcgtgactgccgatggcgcggtctactacgagcgcgtcatccgcctgctggcggacatggaggatgctgaaaacagcctgtccagtgcggcgatgacgcccaggggacggctacgggtggatgtgcccagtccgctggcccgcctcgtcctgataccggcgctaccggctttccacgcgcgctaccctgacatccagttcgacatgggcgtcagcgaccgggtggtggacctgatcggcgacaacgtggattgcgtcctgcgcggtggcgacattaacgaccagtccctgatcgcgcgccatgtcggcgatttgcaaatcggcgtctacgccgcccctggctatgcggaacgccttggcgcccctgcgcacccgcgagagctggaaaacaccgaccatcgcatagtgggattcttgtcctcacgcaccggtaagattgatcctctggtcctgcacagtgggagtgaacatattgaaatcacaggccgctatgtacttgccgtggatgatggcaacgcttacctcgaagcggggctcgctggcttaggcgtgattgcgctgccaacctatatggcggcaaaacatcgggccagtggcgctttaattccgttatttgaacaatggcgtatcagtccaatgccattgtacctggcgtttccgccgaaccgccatgtcaacgccaaactgcgtgtttttattgattggatcgttgaattgatgcagcagcatgttcccaattccaacaataagtaacgccatcccggtctgaggatccctgtttaagaaacccggcagccatcgcgcagccgggatcaccccctgcggtgccagcgcagcgcgtcgaccaccagcgtaaacgccgccggaagatgctgtcggcccgggtagtaaagatagtatcccgggaaatgagggcaccagtcggcaagtagcggtaccagttcccccgtagcgatatatttcgccgctaagtcatgaggaacataggcaatccctgctccgtccagcgcggcctgaatcatcagaaaggtattgttgaaaacggtttgcccgtcaacgcgaacgctggtcttttgacttcccttttcaaactcccaggcgtaaagcgcgccgtgggtgggcaaacgcaaattaacgcagttatgcgccatcagatcctcaggacgtcttactgccgccctgccggcaagataagcgggggcggcaaccaccgccatctgcacatcgggcgtgatgcgcaccgcaatcatgtccttatccacctgatcgcccatccgtacgcctgcatcaaaacgctgggcggcaatgtcggtcagctcgtatccgacgctgaactcaatatgaatatccgggtattgcgttaataaaggccgcagacgcggccacaggacggtgacgatggcatgatcgttggcggtaatgcgtaccgttccggcgggtttatctcgtgaagcgcgcagagaagccagttcagcttcgatttcattcagccgcggcgccagaacggccagcagacggttcccggcatcggttggcgagacgctgcgcgtggtgcggattaacagccttaccccgagacgcgcttccagagccagcagcgtatggctcagcgctgaccgggaaacacccagaatcgcggccgcccgggtaaagctgcgctcgtgagccaccgtggcaaaagcctgcaggtcgttgagtttttctttgctcatcattggtgaattttgtgcaccagtgtattcatatttgcgcatcttatcatttaatcaaaccttctctacactttgttcaacgagtcgtaaggggccgcttaaaagcccaaaactgaaatgtggagacatcatgaaccaacaatttgacggtaacggtatcttccctaagggggagaaaaacgaggcctatgcgcagtattttcagggtaccagctacctgaatatgctctccacggaaggggtcactatcggcaacgtggtcttcgagcccggctgccgtaaccactggcatatccaccataaaggcgggcaaattttactggtgaccggcggtcgcggctggtatcaggagtggaatcaaccggcgcgcgagcttaccgctggggacgtcgtgaatattcccgcaggcgtcaagcactggcacggcgcggccgccgatagctggtttgcccatatcgccgttgccgtccctgccgaaggtgcgtctaacgaatggctggagccggtcgccgacgacgcctatcgtcagctgccttaaacatcgaaacagcagggctcgccagttaatgcgccctgctctcattcggcggtatgcgaaaatgcatcttcgactaattgcccgagccccggggaaaaccgctcatcgccagcagcgcgctttgcagcgaggcgctaaacatctccccgtgagacagtccgggatagggccaccagttgaccgccacgccatttttcttgagcagggaaaccgtctgcagaacgttgctccggatctcttctgcccctgcgaaagaggcccgctgggtcgcaaccgccccctccatcaggtacagggacttccggttaaacgcatccgccttcgccgcggccatttttgctaacagcgaggcgttgccccgtcccagagaaggactggcagaaaaatagatttggaagcgggatgacgccagccaggcgtcaatgataaataatccgccataggagtgcccccagatagcccgctgctgagggttgatagcgatcccgcgctcaacttttgccacgatggtattttctaatagctggcgaaatgcctcgctgccgccgctcttccgtcggtcccatccggcgtcggcaggattctcctctactttcggccggtagtcataggctcgggcaggctgatcgaagggcaaattcgtttgatagccgatggccacaataacgggcggcgttttttgcgtaaacgtctcaagcagcgagtcggacaaccggtccatcaccgcgttgccgtccagggcgtacagaatcggatacccctgcgcgggcggcgccgcgttcggtatcgccgtccagaccttataatgccgttcgccatcaagggagtcgaaataagcaacgttgaagtgataatacgcggaaccgcggtcggcgatattcggccccagcgggcgcatatccggcctggcgtaagcgttaatgccataaagcgtggagaccagcgcggcgataaaaatccgccctttcggcggagaagcaaaacaaaacttgcgaagcgacatcggttgattgtttccagcacaccctcggtagtgataatgattgctaatatcaatctcaattgcaagcaacgaggttatcccgggagcggcgcgttgcgcctgcccggggaacccatcatcacatcacgggtagcccggttcgcgctgcgcttagccgggctaccgggaatgccgcgttatgctcaatatcaggccgtacgccatctccgggtcagcggcttctcgacttccacaatcaggaacatcacaaaaccgataataaaggtgataacccagtagcggaacggcagcgcttcggtaccaaacagcatctgcataaacggcgcgtagataatcagcagctgcagcaccagcagcaccccgctgacaatccagatcccccggttcgccagcagccctttactcagcgagaagccgtccgccacccggcagttgagcatatagaaccactgggcggtaaccagcgtctgcagcagcaccgtgcggataaactcaggcgaatagccgcgcggctgtagccaggcttcaagcacaaaggcgctgacggcaatcatcgaaccgacaaaaatcacccgccagatagcaaagccgtccattacgtgcagtttgggatcgcgcggcggacgccgcatgatgttcttctcgcccgcttcgaacgccaggccgaacgacagcgtggcggaggtcgccatgttcatccacaggatcagcaccggcgtcagcggaattaaattccccgccagcagcgcaataatgatcaacagcccctgcgccaggttggtcggcataatgaagagaatggttttcttcaggttgtcgtatacccgacgcccttccctgacggcgctggcgatggtggcgaaattatcgtcggtcagcaccatatccgcggcctctttggtcacttcggtgcccttaatccccatcgcgataccgacatcggcctgcttcagcgccggggcgtcgttcacgccgtcgccggtcatcccgaccacctctttcctgctttgcagcgcctgcaccaggcggaatttatcttccgggctggtacgcgcgaaaatatcgaatttctgcgccgcttcgctgagctgggtatcgtccatcacctccagttctctgccggtgatggcgttttccgcattgccgatccccagcatcttgccgatgctcatcgcggtttgcgggtggtcgccggtgatcatcttcacgcggatcccggcctgcaggcagtcgccgatcgccgtaatcgcctccggtcgcggcggatccatcatcccggcaacccccagcagaatgacgccctgctgcaaatcctcatggctaagctccgtttgcccgtcggctgccggtttccacgccgccgccaccatccgcagcccttcccgcgcgtactcttcgattttcgcttcccagtaaggctgatcgagcggcgccaggccatggtcggtttgctgatgctgacacagacggaacaggacatcgggcgcgccggtaatcaaaatcatctcttcatcgccgatgcggtacagcgtcgacatatatttatactgtgaatcgaaggggattttgctgcgcagctcggtgttgaccgtcgggagcgggactttcgccgccagcaccttcagcgccccttcggtcgggccgccggtaattttccacagcccgctttcgtcttttataagctgactgtcgttacacagatcgatggtgcgcagatagcgttccagcagcgtgccggggacaacggttatcggatcgggctcatcgatcggatgaatattccctaccggttcgtagctgtcgccctccacccgataaacgttatcggcggtaataacggccttcaccgtcatctcgttcatggtcagcgttccggttttatccgagcagatcaccgtcatcgccccgagggtttccactgtgggcagcttgcggataatcgccttctgacgggccatggtttgcacgccgagcgagaggattatcgagataatcgccggtaaaccttccggcaccgacgccaccgcgaggctaatcaacgacagcatcagctcagaaaccggcatatcgcggaacagcaggctgaagacaaacagcgcggccatcatcaccagaatgatgataaaaatggctttgccgagcttatccatttgcaccagcagcggcgtacggtgtttttcgatatccgacatcatctggttaatatggcccagctcggtatcgccgccggtggcgaccaccaggccttttccgccgcccgaactcaccgtggtgccggaaaacagcagattggtacgatcgcctagcggcagttcgccgctgagcgcctcagtgcttttctccaccaccgtcgattcgccggtcagaatcgcctcttccacccgcaggttatgcgcttcgatcacccgcaggtcggcgggaatgcgatcgcctgcgcggatgacgacgatatcgccggggaccagagcggttgtcgggatcgtttcatggttgccctgacgaataaccaccgcctcgctggagagcatgttgcgaatgctctgaagcgatttttccgcattgctctcctggatatggccgatcagggcgttaatcaccgccacgccgaggatcaccagggtatccacccagtgccccatgaccgccgtcagcagcgccgccgccagcagcacatagataagcacatcgttaaaatgcgccagaaagcgcagccacgccggctttcccgccttttgcggcagcgcattttcgccatactgctgcaaacgcgtcgccgcctcggcgccgctgatgccctccggagtgctgttggtgctggtcagggtttcttctacggagagctgatagaacgggccgcccggtttttctgtattcatagttatctcctcactcctgtaacggaaatcagaacagcctcaggccgcccttaacgcaccacaaaaaccggaacatgggcatagcgaacgattcctgccgcctccgaccccagcagatgcgtctgaatattcgggttacgcgaaccgatgatcaccacatccgctttcagttcatcggccagtttggtcacttcatcgcgaatgttgccgctgcgaatgtgaatctgaatatccttttccgtcagcgcgagtttcttgatcagctctgccagcttttccttagcagtattaatcagatagtcttccatttttcgtgcatcggaaataaaaccgcgcgtcagcaccggagaaaaagagggaatgatgtgtaccagatgaatctgtcccgaagagctttgcgcaaggaattgggcgtgggacaaggccttgtccgccagaccgatttcaaacacatcaaccggcacgaggatatttttatacatagagacaatccttttattacctataaaaaaaggtggtgaaaacagcccgggcaatggcgctgaggaaaagatctcaagaacaaaatctgcaagacgtgtaggtataattaaacgtagcacaccacgataaacattattaagtcgccaattaatatattgaaaaatatcacagagtcaggcgcagccagacaattcgactacaaacccggtaaaatcgtcgccattgccgtaatttttgctctttttaacatttccgttttactacgactatcctcattatcagtggcttgttcgctttctgtcgccccacaataattattacgataagaatttacttagctaagcgttagcgctaaaggaggaacgatgttcggttacagtctgtttcgcctgagcctgtttattgccctggcaataatcgcctgtacggctaccgggttaattacctatttcgttgtctcggccctcgctgaataaatacagcgattgtgaataatatgtaaaacatagccttttacttcgaggggaatacagtgaaccgttatttttctctcattccgcttgttattttaataacaacggcttgcgatcggaaagcgcctgaaattacgccgttaccgcggatggtcaaagttgccgaggtggtggctatcggtgatgcgcagcagcgcgtatttcccgcccgcattgagtccggggactccaccgatttgtctttcaaacgcggcgggcagattgaatcgcttgatgtgcgtcagggagccgctattactcaggggcaaacccttgcccgcctcagcgcgcgggaagcgcagcagcgggtgaatgagcggcaaaccgctgccaccctcgcccagcggcagttcgatcgcttccagacgctggccgggcgtcaggcgatttcaaaggcggaaatggatatccagcgggccaaccgcgacgccgctaacgccgcgctgaaaatcgcccgcgaagagctgtcgcaaatgacgttgaccgccccgttcagcggcgttgccgcttacgtcccggtacgtaaccatcaggttgtcgccgccggacagcccattgtgaccctgacgcgaaccgatctgctcgacgtggtgtttagcgttccggaaaacctctttaccgcgctggatattcgcaacgcgcagtatcgtcctgtcgtcaaaattaacgccatgccggatcgccagtttaccgccgactacaaagaacacaccggcagcagcgacagcagcacgctcacctggcaaatcatactgactatgccgaggccggccgacttccccgcggtgggcggcgttagcggaacggtgacaatcaacctggcgaacctgcccgccagcgccggtcaaaacgcggtggtggtgccggttgaagcggtgtttaacccggataatcgcccgcgcaatgagccccacgtctgggtggtacagggaagcggcgaccagctcaagctggaagagagaaaagtcggcgtgggcccggtgacctctcagggcgtggtgattaccgaagggctcagcgtcggcgagcgcgtagtggcggcaggcgtcagcgaattacatgcgcaacagccggttcgtatctggacgcgtgaacgaggtttgtaatggatatttcccgccagtttattaacaacccggtccgcgtctggctgaccattttgctgctgggcatcggcgggatcttcgctctgctgaatattggccgcctggaagatccggcgtttaccatcaaaaccgcggtggtggtcacccactatcccggcgcgtcggcgcagcaggtggaagaagaagtcaccctgccgctggaaaacgcgctgcagcagctgccgtatctcgacaacgtcagctcaatttcctccaacggcctgtcgcaaattaccgtcaatatcgcctcgcgctaccactcccgcgagctgccgcaaatctgggatgaactgcgccgccgggtgggcgacgccgcccgccagttccctcccggcgtcgccgctccgtttgtgaacgacgattttggcgatgtctttggcttcttctttgccctctccggcgagagctttaccaaccctgagctggttcgctatgccgagcagctgcgtcgcgaactggtgctggtccccggcgtcggcaaagtcgccatcggcggggcgatcccccagcagatcaacatcgatatctcgctggcgaaaatggccgcccgcggaatcacgctcaaccagctggcggcgatactgagcaggttgaacgtggtgtctaacgccggtgagattaaatccggcagcgaatcgattcgcctgcatcccacgggcgagtttgccaacctcgacgagcttggcgacctgttaatcagcccgcacggctcggcaacggcgacgcggctgcgcgatattgccacgctctcgcgcgggctgagcgaatcgccttccagcatttaccacgccaacggtcgacaggcggtcactatgggggtgtcgtttatacccggggttaacgtgattgacgttggccgcgcgctggaaagcaagctggagcagatgtcggcggaaaaaccggccgggatcaacattgacctgttctacgatcaggcggcggaagtcgcccattcggtcaacggctttatcaccaacttcctgatggcgctggcgattgtggttggcgtgctgctgatctttatgggcgtacgcagcggcattattatcgccctgtcgctggcgctcaacgtgctcggtacgctgttgatcatgtacctgtggggtatcgagctgcagcgtatctcgctgggggcgttgattatcgccctgagcatgctggtcgataacgctatcgtcatcgtcgaaggcgtgctgatcgcccgccagcaggggtcaacgctgctcatggcgattaactacgcgatccgccgttcggcgctgccgctgctgggggccacggtgattgccattctcgcctttgcgccgattggcctgtcgcaggactcgaccggggaatactgtaaatcgctgttccaggtgctgctgatttcgctcatgctgagctggttctcggcgctgaccattaccccggtgctgattaaatggtggctgtttaaaaatcaatcgcagccggtggcgcaggccgacgccaatccgtacggcgggcgcttttaccgtctgtaccagcaggctctgcgtgctcttctgctgcgcaaaaccatcacgctgaccgtcatggcggcgctgctggccgccgctatctggggattcggctcggtgcggcaaaactttttcccctcttcaaacacgcccattttctttgtcgatctctggctaccctacggtaccgatatcgcgaccaccgaaaagatgaccagcgatattgagaccaccattaacggccagccgggcgtggtcaccaccgtggccaccgtcggtcagggcagcatgcggtttatcctcacctacagcgggcaacggcagtatagcaactatgcgcagatcatggtgcgcatggacgaccagcgcagcattgccgccctgacgcagcatgtggatcgctatattgcgcgcaactacccgcaggtgaacgccagcacgaagcgcgtgatgttcggtccctccggcgacagcgccatcgaggtgcggattaaaggtccggaccccgaccgtctgcgcctgctcgccagccaggttggcgatatcctctccgcggacccggccaccgacggcgttcgcaacgactggcaaaaccgtagcaaagttattcgtccgcagtactcccccgcgcttgggcgcgagctgggcgttgataagcaggatattgataacgccctggagatgaacttctccggcagccgcgttggattgtaccgtgagggggccgacctgctgccggtgatagtccgcccgcccgccgccgagcgccaggacgcgaatcacctgaataacgtgctggtctggagccagagccgccagcagtatattccgctcagtaacgtggtcagcggctttcaccttgaatgggaagatccgctgattctgcgccgcgatcgcagccgggtgctgacggtacagaccgatcccgacccgctcagccaccagacgtccggggatatcctgtcccgcgtgaagccgcagattgatgcgctcgctctgccgcacggttacagcattgagtggggtggcgatgcggagaactcgagcgaggcgcagcaggggctgtttactaccctgccgctgggttacctggtgatgtttgtcatcaccgtcctgatgttcagttcgctgaaaaatgcgatcgccatctggctgaccgtgccgctggcgctgattggcgttacgccgggctttttaattaccgggatcccttttggatttatggcgttaatcggtctgctgagcctgagcggaatgctgatccgtaacggcatcgtgctggtagaagagattgaacagcagaaacaggaaaaagcgcagcaggaggcgattattgatgccgccacttcgcgtctgcgccctatcctgctgacggcgtttaccaccgtgctcggcctggcgcctttattactcgacgttttcttccagagcatggcggtcgttatcatgtttggtctgggttttgctactattctgacgctgctggttctgccggtaatctacgcctgtttccacaatcagaatatgaagcgacaaccatgaacagtaccggattaaatattattaaaacgctgggatgcatgacggcggtgaccttcttcaccatttacaacacctgggatagctatgattatgactatcactggatcctcgggtttttgacgtttatttccactatcgccacgccgctgttttttgtggtggcgggctatctggattcacagtctcgccacgactcacaatggcagttgggcaaaatcaaaagcgtggtgatcgtctttctgttctggatgacggtgtactatctctgggagccctaccagcgcggctatcttatccagccgtggtttatatttgcgtttatcgtcatttacacctttcacccggttatcgagtggctcagccaaagacgcacagcgttctttgccgcggtgttcacgctgctgctgctctcgtatggttacgatcttttgtccgcgctgtacccgaatgttcatgcgctgagcctggcgccgcagtaccgcctgtggacctggctgctgttttatctgaccggtcagctcttcagcgacccgctggtcgccgactggctcaggcgagaaaaagtggtcaaaggcgcgatgatcgccattccgtttatttatctttttacctggttttacgagcggcatttctttttcgccctgtttaaggccgacagaaatgcgttcattctgaccggttcacaaatctatattctggtggttgcgctggttattgccgccaacggcgtgcggtttcgcaaaaacagcgagtttaaagagacccttctcgccaccattagcaaaacgatgaccggcgtctatattctccactactccgtttttcacctgctcaccacgtttatcccgattaactcgctggggacaaaattaatgctgattgtccttacgtttatcacttcggtactgatttcgatgctggcgctgtccaattcggtggtcaaaaaagtgattacgatttgacgatcgccggttcagctcatggccgcctgcgcatttaaaaaccgtagcgcagccaggcaaacagtacgttgccgttattataggtgccgggaatataggtgaactgcacgctcagacggcggtagctggcggagaagagcggcaaaataatcggcagaggtacgtagttggcaaagtcatcgcgggcggtgatcccggcggtgacgccaagacccaggcgaaattcacgacggctatcaagataccagcccttttcccagccgtagccgacaatcggctgccactcgttgtgcgaatctttgaacatcatggcgtagagcgaactccagttgccctccgcgttatatctggaaacgccgaaacctcctccccacggcatttcattatagttatccgttttctctttatcgtacataaagcggttgtgccagctgagaaacggcagatataaatcgtagttttgcggctcattccaggtctgcgagacgtcgtttttcaaccagctccaccagccgctgatgcgctgctcgccatagaccttcgtttcagcctgtaccgacaaggcgaaaataaacgctattccccacgctagccgcagacaacgtcgcatcgttttatccttaaagaaagtcgcccggtgttcattcagtttgggaacaaaaaacaggctttgcaaatatcaaccaacaaattttctgcaccgtcccgggctaattgcaagtccagttaaacgcccgtttcaggacagagagcgccgccgcggtgatttcatttccttgctgctgggattatgatggcgctaattattctttctgcccgcagtgattgagaaatagatggacttcatcagcattattatgtcggcggggaaaacctccgtcgatgtggcgctttatacgctgttgccaatcatggtcgtcatgctcatcgtgatgaaatatcttgaggtccgcggggtactggacgccatcgttcgctggctcgccccgctgcttaagccgttcggcttaaccgggatgagcgcttttgccctgattcaaatgaattttgtcagcttcgccgccccgctggcgaccctcgcgattatggataaacgcggcgcttcggaccggcatatggccgccacgctggcgatgcttttcgccatgggtcaaggcaacgttttctacccgttaacgcccttcggcctgcactggctggcctcaatcatcatttcgattgtcggcgggctgtgcgccgccgcggtcacctggcatatcgccggccgcaggctatcgatggttgaaaacgtgcgggccgacgcgctgcctgaggcggagcaaaatagccaggggattatcgccgttatcaacagcgccggtgccgacgccatccgcctggccctcggcgcggtgcccatgctgatcctgtcgctggccatcgtcggatttatgcaggcggcaggcctgattgagatgcttcagcgcctgctgctgccgctgctgctgtggctgaatattccggttaacttcgtgctgccggcgctggtcaaatgcgttgccggcggtacggcctatttcggcgtggtctccgagctcgtccagcagggtaaagcgaccgtaagccagatcaacgcctcggcgggcctgctagtgcaaacgttcgatcttcccggcatcggcatctttctgggcgtcagctcgcgcttcgtacgcctgttccgcttcgccgcgattggcgctatcgccgggatcgccatccgcaccgtgatgcacctcacgctattctgaggccgcctcctgcgaacggagacaggcagcgatatccgcctgctcgctacaggcgatatgatggttaatgcgcgccatcatccacgggaaaaacgggttggacgtgacgcgcatcagcgtatccagcccgacgctcagggttgaggtttccccgcgcaacgagatcgtgccgatgctgatcccgtagcgatttttctccgccggttcgcggccatagagcgagtcggtcagcgggaacggcaccgccacgtgcgatagcgaatacatatcctgcggccaggcgatattcagcggcgtcacggtttcgcttcgcatcccggcaagcgtggtgcgagccaccgtctcgtaggtgtcgggcgcggcgttggtaatcaccgtggtgccgtagggccgaggcgccggcggcaataacgtattcaccgccgaatagagcgagggacgaaatagcgcgcgcaaattcgccgcctggttaatgtcgaaaatcaccagttcgctaccgttatccggcagataacgatagagcgaatccaccaccgcccgggtgctcaccgttgaatccatcaccgactgaaaagttaacaccggcgccagttcagaaagccgctgacgctgcgcttcctgcacgatttgctgctgcagcgcctgcgacaacagccatgactgccttgccgccttcaccgggaacgaattgtatttatagggattaaactccgggacgacgttcagccacgccgcgcgggcgaaagccggaaatacagaaggtaaaccggccagcccggcaaaacgcgcaaacgcggtaacgccaatcatcggcgacagcaggatgacctgctgcggccggcgcagcgacttatcttccaggctatcgagggcgtacttcagcgccagcgccccgccgttggagtagccaaccacgtgcagcggcgcgtcatcccccgccaaccgcgtcgcttcgcgcaccgcaagccgggttgtcgctatccactcttcgcggtccaccgcggtgagcgcgccgggggcggtaccgtgtccaggcagccgcggcgcgacggcaacaaatcccagctgctgatagcgctgcgccagataatgtacgctgtagggcgaatccgtcaggccgtgcagcagcaccgccgcgccgcgcggtttgccctgcggcaggagaataaaggagcggttccagtcgggatgaaacttatccggatagaccagactttgcgcgtaaaagcggttaatggccgttttttcatcgtcgctcagcgtgtcggtaatgctgcttttcatatcgcggaaaatcgccgcttcccgcgtctggtattcggcaaaagtggcgcggtcaatctcgctggcgctcatttcattcgccgtccaggtatgccagcggtgcagcgccggaccgcgctgcgattcgtaaatacggccaataaaaaagacgatcacgaccaccagcagcccaatgatggcttttttcgccaccgagactaatcttaatcccgacttattcagcagccgggtaaaacgcatcattgccatatttctgtccgaattatctctttagctgccagggtgggctattatgcagaaggaatccgatcctgcgattcacttattaaacatagactaaaccaaccgcctgttcttattgtcagatgaggagcaaacatgaattatcgccggagtgtaacaggtcaggaataaacaaatggaatggtggattaagaaactacgcgaggcctcgacgtctacacatacccacgcggttctgcaaagcggccaactaaccatcattgcggaactcacttcctgcggccgacgtttacaggagggcgataagctgacgccgttggctaacgcgctgtactgcattaacgacaataagtcgatcaccctaaaagtgctcaacgccacgcatttcagcgctgaacgctggggcgccatcgcgaatatcaccgcgcattaatcgacatcccccagcatcaactggttctaatctcagtactttctcaactaagcgggttaaattgtcctgcgcctttttcagtctgtgacatactaagcaaaacgtcagcagagcagaaacaaggagtacgtcatgaatcagaaagccgccaggctgaccccagaacaggcgcttacgcagctcgaagcgctctatgaaaaatcggtcaatgcgctgcgtaaagccctcggcgattatattcaccataatatcctccccgagaatagcgcccgtgcggaaggactgttcgtttacccgcagctgtcggtatcgtgggacggagcggaacataaagcgttaaaaacccgggcctggggtcgcttcacccatagcggttgctataccaccaccatcaccaaccctaaactgtttcgcgcctatctgctggagcagctcaccatgctgtatcaggattacgatgccgcgattaccgtcgggctgtcgcaacatgagatcccctatccgtacgttattgatggctctgaactcacgctcgatcgctcaatgagcgccggcctgacgcgttttttccccaccaccgagctgtcgcaaattggcgatgaaaccgccgatggcctgtttcattcgacggaatactatccactttcccacttcgacgcccgccgcgtcgatttctcgctggcgcgcctgcgccactataccggcacgccggttgaccatttccagccgtatatgctgtttaccaactacacccgctacgtcgatgagttcgtgcgctggggctgtagccaaattctcgatcccgagagtccctatatcgccctctcctgcgcgggcgggatctggataacggcggacacggaggcgccggaggaagcgatttccgatctggcgtggaaaaagcatcagatgcccgcctggcacctgataaccaaagacggacaggggatcacgctgattaatattggcgtcggcccggcaaatgccaaaaatatctgcgaccatctggcggtgctgcgtccggacgtctggctgatgattggccactgcggcggcctgcgtgaaagccagaatatcggcgactacgtgctggcccatgcctatctgcgcgacgaccacgtgctggatgcggtgctgccgccggatatccctattccgagcatcgccgaagttcagcgcgcgctctacgacgccacgaagcaggtcagcggcatgccgggcgaagaggtaaaacagcggctgcgtaccggaacggtggtcaccaccgacgatcgcaactgggagctgcgctactcggcctcagcgctgcgctttaacctcagccgcgcggtggctatcgatatggaaagcgcaaccattgccgcccagggctatcgcttccgcgtcccctacggcaccctgctgtgcgtctccgacaaaccgctgcacggcgagattaagctgccgggccaggctaaccgattctatgaaggggccatttccgaacatttgcagattggtattcgggcgattgacctgctgcgcgccgaaggcgaccacatgcattcgcgcaagctgagaaccttcaacgaaccgccgttccgctaagcgctgatatcatacgagcagaatacactcagtccggatcgcgtgaaatatttacgcggccaccagccggactgagcgttataaaataaagcgtttatttttgttaggggtaaaaaattctcagagcacatccatacgtgtatatccgcacaatattattcccactatgaaaatcaacaaataaacattttattaacatgtcagtatcattttccctgtggtcataaaacgcccagccgagggctgattaatacttgaactaagtctcgtaacctattaaattaattacataaattcacataggacaaaaaagcggcacaaaatagccagcgccagagagagatcaaaataattaaagagttacctatgggcgctactctactctggaatcatcctttaatagcgacaggttgtttgcaacaaataccttgttactaaattaccagagatgaaattgcgcatgtcgacagtaggcaaccatgaatatgcttatctatcgcgatcggcaatgtactattttcgtaaaagtatggaagacagctttatgaaattaaccatagggaatatccgcctgtttattttattagcaactctttttttctggactgccgcgatcgggctaatttcccttattgtatcctggttttaagaccctgacggtgcgccgggaatgttcttgtgccccggcgttgccaccatcgtggctatggaataggaaagcaaaaagcccgcttaagtttccttaagcgggcttcttaaatatggctcctctgactgggatcgcctttgccagtaactggctaatataaaagataattaaaaagtctcttatgtcaagaccaccaagatgaccatcaaaactcacaagtgagtcgtactattttttgtatgtactttgttctaatatttattgtgcacttagtaggtttttattaaaaatgccacaaagaaagaaaagttcaataggtagctaacgttctataaaattagagctgttaacttaagtaacatagatataatatgaaggttggataaatggaaattaataatgtttcagaaatgcttaggtgtttcatgatagcagaacgtgatatattgaataattccgatattatccatgctccgactataggggaaatgtatgaaggattgacaaaggatatattaaaaaaagcaataccttcagaattaaatctatctgttgtgaatggttttattcatgatggacatggtgggcaatcgcgacaaattgattgcatggttgtacatggtgaaggtgaagtaattaggcacaccaataaaaaaagataccatgtaaaagatgttgtggcaatatttgaagtaaaaaaagagcttttgtctgaacagttgaaggattctatagatctattaacgacgattgatgatatatatttttcttatagaagtaaaacattagatgcacctgcattttctactttttatgctgctaaatcatttgagagaataacgggaaagattgctcctaggtatgatgaaaaggatagtttatctatcttggatagtgcaatttatcactctttagttattgatcagctaactcctgtcagaattgcaattggatataatggttataaaagtgaatataatttcagacagtcattttataactattatagtagtatgggaaaattccgaacattcaaaatacctagtttattgattagtgatggtttttcaatagtgaaacaaaatggttatccatattatttattcttaaagaatagagggtggtgtattgcttcttcatgtaaaaataaccccttgattttaattcttgaagttattttttataaaataaaacaaatgtttgatgttcaaatagaacttgaagaggttgtggaaaatgaaaatatgactccattagtgttattagataaaaaatcagagaaatggaattttaccttctgtgaatataaccctaatgatcttaaagatagggatgattttttaatatgggcacctttgtatttaaaagaagatgagttgtccattataaaagaaatttgggatgcaggcggtttgtcagaaatagatatattagcgttcacagaggaattcccaactttttcagacattcttgtaaagctcttggaagaaaggtttctgatctactctggtgatttggttgctgttaactctgatattttcactcaacaagcagatgaaggatactacttatttccatcaaaagagaaacatgaagcatggaagaaaaaatattatagcacttaagttttacactatgtttgaaatattcaaatatggttttctgaatgaaaatactagccataataggccttcgcttttatatcatacattggcggactgacagttatttatatgaaatactgtcagtctttataccaatttgaatttttcaattcgaaaatgaaataggagtttaacaactcaatctcagccattcatttgtatctaacccaactctagatatattagaggcgagactattagcgatagattgggctacactatttttaaattcaccaatccatgataattcagcttgttgctcatcatctttaatgtaacaaacaacaagtctgttatcccttctaattacttttattgagctggtggttatatctggaatgagtttgaatatgtggatgtccttagagccgggtttaattttaaacttcataaaagtatcatctgcacttcgtaacacatgagtaaatttagggttagccgcagtcatcctatctatttttataaaaatgaaattagtagggctctgtatacgaacactatcacaaagtggttgcatacacatataaaattcagtgtcactttttttaacgatagagccttgttttatagtcggaagtggggatgagtcggttagtgattttaaatctctacgtttgcactcaattgcgcttaagttttcatgagggagatactcaacaccatttaggctaatctgtattttggccttcttaaatttttcaattgtctcaccattacgtttcataatgacaggtgcttctgataaggtatttaatagagtatcttccgattctgtggataaaagtcttttgattctgtcggatgtgatggaaatgttattaccatcattgattttaacttggaataaatcatcacggttctcactattaatataatctacccaatcatgaattctagttaagtttaaattatttgttattgattgactaatttgaaggttggattttatttcttctgaaataatgtctgtagcgtagtcaaaagcaacttcatgagctttttctctcacttgaggtgaagagaaaaggccaacaacatgggataagtaagcaggatcaagctgtttattgaatgtgtgtaatatatgatgtgttttttctcttaattctcctatagcggaaagagtagcattggacagtaatccaatagttaattttgtaaacaatgttataactctgtcaactaattgagcagcgtcaaccattttttctatgacttcgatatgacaaaatttaaaaacgtcatcattaaatgtgatttttgtactttcaaaggtattagaataaccttttgaattcaaatgatctgaaactacttttgtaatccctgtaagttctggtgaacctgtataaattacgataagtcgtaaccgaccttgttgctctttatcatgttgtaatatttttgcaatgcttgctatagccagtgtaccatcgcgctcctgactatcttgattgtttttaaactgcgaatccatttgccagtctaaaatagtaatgtctgtatgtttggaacctgtcattattcggtttgatgcgttggggatatttacatctctcgatggatcaggtttaaaagcgcagcaatttattcctttatctgagaatgcaatagataaatcttggtaattcagtgggttatccattggggctggtatgagtggggtttgtggtacgacacctaacccactaacgtcattactagctgcatcaaactctgcaaaatcatcattaacagaactatctattgtggtaattgcttttccaaaggataattgatcgtcaacagcgataacgttattaagaaatctacttactatttccttagaagatgcgaagaaatttgaattttccaatttataactccaaaattattctttatcttgtatcggttctataataaaaacggcaccagtgttaggttgataagattcaagagtaatatcaaaaccatcacgctgtaatgtttgtcgagcgatatataaccccattccttgtccaccaatacggcgcccaaaaccgaattcaaaaacgttctcatggtcgatagtaggaatacctgggccactatccattattttgaaaccatttttggaagcatcaagagttatacttttatccgccgagcctttcgatacccaatagatcgcattatctattaaattaatgaatacggaatatattgttgatgtataagcttgaatactttggttaataaaactagatgtgtaacttatgcgaacctcttctttcttaaatcggtcatcaaataccgactctataaattcactaagagctttccctgttatagtcgtccgtcttcttgactgcgacctagtcaatggtgtaaatgttttaagatatgcatcaagatgatcgaagccagaacgtacacgatcatatattgctctgaaattttcactgcggttagcgaaaacttgcatttcattgaggccgcgacgaatagaaagaacattatgattgaattcgtggttaataattcctacagccattcctatttgcgctaaatgaagattcctatcattttgttcttttatatgctcatattctgactccagaacagaaacaagttctgatgatgatgttatattttgctctgaatcttcttttgctgtcaataatctttcggtaatcagattaatattttcaattaccattgaagaggaattatcaatctttgtttctagttcatttttaatacgataaagttgttcgactgtaacaccctggaaacttgtggagttgaacgcattgaatacttcatctgtatttttttttgcaacttccctgttatgggtaatcattttttttacttgttgttgcaaatcttcaagaatagacgtggccttattaaaagcttcattcaatagttttctttgatactcatcttgatttactaacgagtcattgaatcttcttcttagcccagtcctatcaccatatttctcttcgaaactaactaatattttatttgcgttgttcttaacattactaatcttattgataagttcattttttctgacttgatataaatcccattggtcagctaagtttttattaaggccaatgccagtaggtttatttatttctatatcattaatcaacttaccaaaatcattatttactactgactcaacagagaaggcaagatcatctattgaatccgtattttgattgaaattattaaagagagtgtccagtttattatttgactggagaattgaagagtctaattttccttcatcaagcttggtgaagaatttgttaagtgctgcttcaaagttttttcttttagtggtcttaagtttttctcttttctttaatagttcgtattcacgctgttggcgtgctcttgtttcgataaaggtagctgcaagttcacttttatcattgaaaaagtctgatgcaattgagataaagaaattttcaaggattgcttttagttgtttgtaggctttattttcaataaaaccttctcgacctgctttttctttaagttcacagttaaattctttagtcagttcgatagcgccaaacattctgcgataagaaaaaaaatactcttttaagctcttagatctgcgttgttctatacgaaggaaatcaaaatcagaatcaccatatggtagaattcggattccatctcgataaatgtaaagcccaccaaacttatctgtcttatctcttaaatcttgccagatttcaggcgataacttactatctctttgtgtaccatgaatataagcaagattgagattaaatggaccacataaaacctctttgttattattttctgcccacggtactacaatagatttctcttctccataaatttttatggttccttcaaattggccgaattcattaaaattgccattaaaatggtgatctgcaatcgaaaactcttctggtgtaaagaaaactgactcacttatcctatcaatacattcgccatgaagtgtatgatcacgaaaacgggcaataataggtacttgcgaatgctcgtacatcgtatttgtaaaaccaagtaacgctttctctaaacgagaggcttgatcagtacgtttcttggtatcaaatccttcaacttcgtcagataatatatcatcaacaggcgctataataaaatgtgtcccactttcattttctaaatttaagtgagggcgtgaaggaattagattaagttgtttatctaaattatcaagagcgatggaccagaactcaggatcataatcaaagtattctatttgtttaataagctgctcaattttattttgagaaatcttgcctgttaagttattaacatttttcaatgcttgtgaaattaagttatcgatatgctttttattcaaagactcatcatgatttaactcaataataggtatgtcaatatcttctaaattaagctttggtaaggaaaataacgtccaatttacaaaagatacaacgatatttcctaatatatcatttttgcgggagcgtgtaattactaatacctgaggtccaattgccgcaattgctaaacgtccaattcctttttcacccataatagggcgtttcttctttttgtcgtcagtagtcggtgcaccaatactgtcttcatcaatgaatttactatcagtgccaattgttagccatctttcttcaaaatcatctcggctcattcccaagccgttatctcgcagtataagtagatttttttttcttatataatctacttctacgttgtcagcatatgcatcatgggcatttttgaacaactcgcttaatgcagttggaatccctgcaatctgttgtctacccagcatgtctaaagctcgcgctttggttttaatttttgccattctataattgggttaacaacccccatcctccctattagattttgcctgctctaatattgattcagcaactcgctgtgccaacaatacaggtactgcattcccaatttgttttgatttagatacattactaccaagaaaatgaaaatcttttgggaatgtttgaagacaagccgcttctctgaaagtgattgcgcggttttgagttgtatccggatgcccaaaacgaccgttggaaatgctcgtacattttgtagtcaaagttttacatggcttatcccagctcatccgaccatagacgtccgtgtggccatcatattttctgtggcaattcaaccatagttcatcaggccaatctcttctgtcaccaccttctggtgtatgctgtagtctcttaatgttgatgggttggataacagcagccgcatgtagtaggtcattactatctgactcacctgcttgtaatttaggcagacttccaatatagtctcttactgtagcgaaaggaatattatcaactccatgtgagtaagaagggaatattggtttgtcatttagtcttgctaacacaacaagtcgttttctttgctgaggtactccataaaattcactggaaacaaccttgtaatcatactggtaaccgaatctactaataaaattcaaaaaatcagagaatggtccattttcttctattttgatgctttgaatacctggtacattttcaataaaaataaaagctggtcgaaatgctcttataaatcttttggtctcacccaataacgttcttcgtttatcacttgagttacgaattttgttttgagaagaaaatggttgacatggggcacaggcacaaaagaccagctcagaactcttcagatctggtactagcttagcaacgtcttttactttgacgttcctaatgtcatcccgaatgaactttgtgttggggaagttcgctttatagctactagctgcattttcatcaaaatcaatgccgagagcaacctcaaaccctgccagttcaaagcctttactagctccaccacatccacaaaaaaaatctataaccctcattgataaggttatccctgtattaaaattagtcttttttccgctgaggacagcggttcgtattgattacgagcattataataccaatcgctagtcctgtaatctttctctaggtatgctgtatccacactcagtcagcgtttttgatgtttcgcgaggtcgcatggataaaggcagcatatggttctataccagattcagccgtcatctacgctgccagccgctcgaccaacccatcctgagaaaatttgttaatgtaatgcttcattattttcactgaatctaccagcatcacatgctcgaccgtgtttctacacctggtgttcaggttaccacaatgtattcatgaggtaagccctaagatgatgccacaccgtccatagccaatcaaagcggtgcaaggtgcatagtttattcgcgcacagcaaaagcctatttcaccactgcggagtaagggggtctacgcccggctatgcaggggtaagttttttctcctgtgagcttttcattctcgtatcggcttccggttaatcgtttcccaacacaacccgtcccgcaagggtaaatggcacgcatgctgcgcccctgcaggacagaacgatgccaggaaagcgaaccctcaggcgatacgaagacgaaaatcacacacagacggagaaaaaaccatgacgatttccctgcatactacctagacaagcgcccctaacgccgcagcggcgaccagcgtatccccgctggacccgtcaggctcctcaaaaacgaaattttctaaaaccagaaccgacatttaccagactgttactgacaacatccagcagacctttattcttagtccctttcagcaggtcgataaaatgacgtggttttagttcagagacagatagatgcccaatgatcggaaaaatatggttattcatgctgtcgagcagacggagggcatgattctcagaccatgctttgttgcttttatgccagcttagtgcaacagacttgaaggtttcttctggcaacgcagtggctctttcagcggagcgttgttgtgctgggtgattttctgcaccagtagcttacggataccgtcacgctgttgacgagcatcagacagagagacatcaggataagcacctaagctgaggcgggattcttttctattgatgcgatatttaagaaaccagagacgtgaactacctggattaaccagcagatacagaccttgagaatcagaaactttgaaggcttttgcgcatgattttaagttgcggatttttgtgtcgttaagagacatttgggtgtcacgccgtcatcgaaccagcataaccccaaatctgaccaccaaattctcccgatgtggagggtaaaccgaaaatacatcgggaagacttttcacgctaacttattggaactgaatcaaatagggattcgcaaagcagcatgaaaacaagaagttggctcctctgactggactcgaaccagtgacatacggattaacagtccgccgttctaccgactgaactacagaggaatcgtttgaacgaggcgcatattatcgatggcgccccaccttgtcaaaggctgttttcacatttcaaaccgtttgccgaataattctccactttgggcgaaaagtcccgtttcgcccaccgcgtgttacgtttcttcaacctgcgcgcgggtctcgtcggcctgcgctttcgttcgcggatacttccacagccagcgcccgctgaccatccggcagtaaaacaaaacgccgcgcaccgcccagtcaagcaccatacccagccagacgccgatcacccccatgcccagcacaatccccagcgtgtagcccgccaccacgcgacagccccacatgccgagcattgagacccacatggtgtaacgcacgtcgcgcgcgcctttaaaggcgcacggcagcgtccaggccatcgcccagatcggcataaagaaggcgttcagccacagcagctctttcaccaccactttgacgtcctcttcgctggtatagaacgaggcgatcaggccggcaagcggcgcggttccccaggcgatcgccgtcaaaatgatggtcgacagccagaagacgtgccacgcctgacgctccgcctgagcgatctgcccttttccgaggcgtcggccggtgataatagtcgatgctgaaccgagcgcgttccccggcaggttgatcagcgcggccacggagaaagcgataaagttaccggcaatcacgttggtccccatcccggcaacaaacatctgcgtcagcagcttaccgccgttgaacaaaaccgattcaatgctggcggggatcccgatgcccatcacttcccagataatggcgaagttaaacggcttaaaatagctcttcagcgaaatgcgcagcgccgggttaaaaccgatcattagcacccaaatggtggccaccgcgccaatgtaacgggcaatcgttaatcccagccccgccccgacaaaccccatgccgggccacgagaaaatgccgtaaatcaggatgctgctgataataatattgaggatattcatcccgccgttgatcagcagcggaattttggtggtcccggcgccgcgcagcgcgccgctgccgatcagggcgattgccgccgccggatagctcagcaccgtcagctccagataggtcagcgccagagcttttacctcttctgtcgcatccccggcgacaaaattaatgatttccgcgccgaaggcatggatgaccgccgcgagaataatcgagaacagggtcattatcgccagcgactggcgcgctgccgcccttgcccgccgccggtcccgtttgcccaggctaaacgccaccaccacggtcgtaccgaggtcgatggcggcaaaaaaggacatgatcaccatattgaagctgtcggccaggcctacgcccgccatggcctctttaccgagccagctaaccaaaaaagtactcaacacgcccatcagcaatacgcaggcgttttccagcaaaatggggaccgcaagcgggctgatttcacgccagtagaggacgcgatagctcttgcgttttttaaaccaggacgtgcgttcgacggactggcgtaatgcggcggtgacgttcaagggagaccttagtgagaaaagttgaaactacatttcaaatgatgatagagaaaagctaatcctgcaaagcatttttcccgataaattgtcgataatggcgacaatttgttgatggatgcgccagttgagcctcggacggcgaatagatgtttgacaaaagttttttcgccgctaagatacgactccacaacgattcctctgtagttcagtcggtagaacggcggactgttaatccgtatgtcactggttcgagtccagtcagaggagccaaattcttgttttcatgcctctttgcgaatctttatgtaatttagattcaataagttagcgtgaaaagtcttcccgatgtatttttagttttccctccgcatcgggagaatttggtggtcagatttggggtcaagttggttcgatgacggagtgacccccaaatgtctcttaacgactcaaaaatccgcaacttaaaaccatccgcaaaaccctttaaagtctccgattcccatggtctgtatctgctggttaatccaggcggttcacgtctctggtatctcaaatatcgtatcaatagaaaagaatctcgccttggcttaggcgcataccctgatgtgtctttggctgatgctcgtcaacagcgtgatggtatccgtaaattgctggcgcataatatcaatcctgcacaacagcgctctgcggaaagatccacttcctcgccagacaaaactttcaagtatgtggcactggactggcataaaagcaaccgaacatggtcagagaaccacgcctcccgtctgcttgccagcatgaacaatcatatattccctgtgattggacacttgcccgtagcagaactaaaacctcgtcactttattgacctgctaaaaggcattgagcaaaaaggtctgctggaagtcgcagcacgcacccggcagcatatgtgcaacatcatgcgtcatgccatacatcaggagttgatagagaacaatccggcagcaaatctggagggtatcatctccccgcccgttaaacgtcactaccccgcccttcagttggagcggctaccggaactgttggctcgcattgaggactacaagcaaggacgagagttaacccgcctggccgtattactcacccttcacctattcatccgttccagcgagcttcgtttcgcccgttggtctgagatcgatttcaaaaatagaatctggaccattcctgccactcgcgaggccatctccggtgtccgctactctgggcgtggtgcaaaaatgcgcactccacatatcgttccactctcccgtcagtccatcgctattctgaaacagatacgggaaatatccgggcatcgcgtgctgatattccccggtgaccataatccgtataagccaatgtgtgaaaacaccgtcaacaaggcgttgcgcctgatgagatatgacacaaaaaatgaaatctgcggccacggattacgggcaatggcctgtagtgccctgatggagtctggcctgtgggcacaggatgcggttgaacggcagatgagtcatcaggagcgtaacagcgttcgagcggcttacatccataaagcagaatatctcgattcccgtaaagcgatgatgcaatggtggtcggattatctggatatgtgcaggaaagcgtatgccccaccttatatttgtgggaaggaaatcagttacacaatgggataacccctctgacagaataagccacaaaaaaaagccgtatcagtctgtactggtagggcatttttctggcttcaactcggagaaattgttaagccgtttatgagcatctttaaccgaattgacctgcgtgaatcgaaagtgtgaggtccgcttatcatttagatctatccacggaaacggattgggtcagttatgagcgaactatagtcattctaaccctgagaattacacttttgagtgattcagggtatgcgcttactggttacgaatattgagcgagaatcatgtgatgatcgccgcttctctttcgaaccagtaggtgctccgcgttcgctaacgaatactcagggcatgcagatacactgctgactatatttctttcgaagagtgtggaatgcataccaatccccgatgaaaggagttggtgatgactgcgactaatcaatttgctgcacatgttggtctggactgggcagataaaaaacacgatgtctgtgttcagttcaaaaacggtgaacgcgtattccatgtgattgaacatacggcagaagcgcttgatatctggcttactgagttacaccagaaggtaaaaggcagaatcgcaatagctctcgagctgaagaagggccccgtggtatatgctcttcaaaaatatccctttatcaccgttttctccgtccacgctttgtccctggctcgttaccggcaagccttctcacccagcggcgctaaaaatgacccgcaggatgccgagctagcattagagttaatgctacgctatcccaaaaagataaaagccattgaacccgacaacgcagatatccggttactccagcaattagttgagcagcgccgactgctggtcgaagacaagcgtcgctttgtaaatcggctcatcaacacgcttaagcagtattaccccctgcccctggaatggttctcccatcgggacaattcactgttctgcgagctaatcattcgctggcccagcctgcaacaactcaaacgggctcgcagcgatactgttcgtcattttatgaacgctaaaggtggtcctgctgttgcatataccgaacagcgggttgcaagtattgccaatgctattccactgaccacagataaaagtgtaatagaggcaaatgcattgatggcaacagcactcgcatctcaaatcaaactggcaggcgacctaatcagaacctacgacgaacgtattgaatccttattcggtacgcttccggatgcagaactgttcaaatcacttcctggaatgggaccgtgcatgggtccaaggatgcttgccgcactgggtgataaccgcgaccgcttcaacagcgctgaagaaattcaaaactacgcaggtattgcaccggtgacagaacgaagtggccagaaatcctgggttcactggcgatggcagtgtgctaagttcgtcaggcagacttttgttgaatgggctgccaagacggttaactcatcatactgggccagactttattatcagggactgcgagaaaaagagaaatcgcaccaatctgcaatccgggctcttgctttcaaatggataacgatcatttaccgctgctggaagaccaaactcggtacgatgaagcgaagtatttgctggctctcgaagcgcgacactcgcccttactgaagccataaaaagcttgttgaatgtctcagggcgtgaagcggacgctggtgttctttgaataaatccggcttctgtgcttgtgcactaatccagggaagaaaaatattgcgtcggtgatttacccagcgcttttctgaacatcgtaataaacgcactgaccgaatcatatcccagcgttccggctacgcgctgcacgggctgaccttcagacagatggctcagggcaatcatcaaatgcagctgctgacgccagcgaccaaagctcattcctgtcgcctcttttatcagcctggccagagatcgttcgctgatggccagatgagcagcccaatgctttaacgttcgccggtcatctggctcattaaaaagtgcctcagccataatccggattttaggatgatctgatacaggaagatggagtgcttcaaccggcacatccggaatatgctccagcagcaccgctgcaagcctggcggttttactgtcaggagaataagcatgttcctgctctgcaagatacagaacaagctcgcgaaccagaggtgtaatcgctatggtacagcagattttcggcatcgctgccgtgccgggctcgatgaataaaaggcacgtgtctgcattcttcgtgatccggcaacggtgggggatttctcccggaacccagacggcatgtcctggtggaacaagccacagcgcatcctcaacctcacagcgcactgcaccgcgcaaagagagaataagttgccccttgcgatgagcgtgcggactttgcccggcatactcacctgacgatgatacatgcagggcgatagcggcctgactgaaatcatcggcattaaactcttccggcgaggtcacagattttttattaactggcatgatttagctatatgttgtcaggttatctatattctgtaactcatgcgtcctttaaagtctttcttttttcagagaaagcaaaacttatgtcccacactacgaacaagtggtcttcaatcatacttgtgaccggcatcctttttatcgccattaacctgcgtgttccttttaccgctatagcacccgttttagagtccattcgccatgattttgggctaagtatcacagccgttgggttgcttaactcgcttcctttactggcctttgccgccttttctccactgagcgcatcgatttcccgcaagtacggcctggaacgcaccctttttggtgccctggtcgtgatttcagcggggattctgcttcgctcaacagacagcgtctgggcgctttatggcggaacagtgttaattggtatcgggattgccctgggcaatgtcctgctgcctggcctgatcaaacgtgacttttccggcaacgtggcttccgtgacgggagcatattccatcaccatgggcgccgctggcgccattggatctgccattgtcattcctctgacgcagagctggggctggaacatcgcgttagccatgttggttattgcaccgctccttgcgttgcttttatggttgccgcagttgaagaaaaagcatcaactgccagtagcaggtgagaaaaaagcagcgaccgttgcggtctggcgctcgtctctggcgtggcaggtcaccttgtttatgggcctgaatgcgatgccgttttatgttgcggtcggctggctgccagccattctgacagacagtgggctctcctcagctcaggctggtgaggtacatggcatccttcagctcaccaccgccattcccggcctgattctggcagccacgctgcgtcgtcttaacgatcagaaattagccgctgctggcgtcagcctgttaaccgcagtgtcctttattggcatcctttatttgccaaatctggcgatgctgtgggctgcactcctcggcttcggctcgggtgccagcatgatgctgggtctgaccttcatcgggttgcgcactacaaacgctggtgatgctgccgcgctgtcaggtatggcgcagagtatcggttatctgatggcggcgatgggaccgctgttgctgggtaaagtacaggagttgtccggaggttggacggtgccattactgatgaccacagcaatctcagttgcaggagcctgcaccggaatggctgccggacgagatgcgcacctggaacctgtacagcagccgggctgaatgggtttacacagcaaggtaccagctgatcctctgcggcggatgctttccatcgaggttctgaagcgtcttaatggtaccggagccatctgtactatcccgatgagcggacttttcggtgaaaaggccgctcagggcgagcgtaacattcagcggccgccctgaagctcagggcgatcgcggtcagtaataatataataaacaagccttatgactgtttggcaacgatgaatcgcttttcatcactcataaaggctttttcactggcgggtgaaaggatggcaccgaaattcatatgcgcgcggagtttccatgatggaggaacattccactcagtgcgaatatcttcatcgatcagaggattataatgctgcaggttggcaccaattcctttttcagccagcgccagccagacagcatactgtgcaatacctgtgctgtgctcagaccataccgggaaattgtccgcataggccgcaaactgctcctgtagtgacttgacaacatcctgatcctcgaaaaaaagtattgagccggcagccgctgcaaacccgtctattttatctgaggtgccggagaaactttctgcaggcacgattttgcgtaactgttcacgcgtgagttcccataagcgagcgtgctgctcacccagtaaaatcagaagccttgagctttgcgagttaaaagcagaaggagcctgcttcactgcctcaatgacagtgccgatcagctcgttctccgggacaggaatatcttttccaagtacataaatggtgcgtcgttttctggcaagctctaaaagttacctgtcatgaattagccctcagatgaattgtctgacatcgtaatttgccccgtcttgccctctgactggactgatagggtcagcatgcaataatacacgctgactcattagtgcatgctttccgaaggattacggacaggatgcgacattgttaaaagtttggactggaagtaaagatgcttcatcagcccacgcttctgaagcattaacggttccgcatcttattaatctgaatacgcctccgaagacacggtcagtgtgatattatcgcttacataaggaacgtatttatcaattttaaagtctgatctcttaatcacaccggtggcgttaaaacctaccgcatttttcttctccatagcctgaaaacctgctttgttcagggttgcatgaagaataaccggccgggttatggatttaatggttaaatttccccgtacgtcatacttatcaccattcatttcaatgctggtgcttttaaaatttgcgaccggatatttctccgcatcaaaataatctggctgaccaaactctttattcagtgctggaacgccggtatcaatactggctacaggaattttgatatcaaccagtgataaaatttttgttgccggatcgaacttaactgtgccatctacatgatgaagggatgccgtcgggttcgaaaaacctaggtggttccagctaataaccacagacgtatgcgattcatcaagtttataactcgctgttttcgcctgtgcagcagtagtaaagagaagtgaaaataacagtgaagcagaaagtacatgatatttcattgatataacccgattcataaggattgattgttattagcgcaggcgcttatatagcaagccggcttatttgataaaattttcgttattacacaaaaaaattatttgttcgtgctggcggctaatggctatcagtgtccgtaacgtatgacattatcgtgtcacaaactcagcattaccaactcattatctggttatttcaataattacgatggttaagccgcagcagcatggcacatgcaaatctcttgatttcagcgctatagtagatttagactaacttatcttcaagtacccacctcaaggtaagtatggaaaaattcaacgactgttttacactggacaacaaagaacccggtaatgttttgcgggaggcatgtcctgcccgtgaagttctcgaggttctggtgagcaaatggacattgctcattattcatgccctttctgacggtgcatcaaggccgggtgatttgcgaagaaaaattcagggtatatcagaaaaggtgctgtcacagaatcttaaggaacttgaaagcaggaatcttgttacgcgcactgtctttcgtgaagtaccgcccaaagtcgaatatgcactcacggaactgggaacgtccctctggcaggcagcgaatgaactcaaccggtgggtagaacaaaactgtcactttctgattaaagacactgatccttccatgtgacatgccattgttcatttatgagtgctgcgggctaacaggagcatataagaaggcaggctgcaggcgccgaaaagcgacttcccttgctggctcagaggcggtatcgcctgctggccatgagggaacagcaaggcattttaacaacaagtccctgcagtttgttgtatcagtacaaaaagcactcgcgtctcagtctttgcccggcccatggtcaaaccgggttcctttgccgatggcataaaactgccccccggcgacataatgtatggttcgtaattcgtcaggtgcttcatcaaatatccagtgtccattgcgaaaaacccgatcgtcactccacgcgccggcaatttctcccataaacagattatgttccagctcatatgccgcgttgggtattaccttacatacaagccagccagcacaaccctctaccagcggaacatcgaactctttcaggtagaacgtcggtattttatgattcttgtcaggcctgtcacggtagctgtgctcacctgcgtacaaaacggtttccatctggctgactacggggatctgtacggcaaacagaccactttcttccaccaatccacgggtataagcctgcggaccgatatacgccatgactttattgatccccaccagactcacccaggcagcggccatcacattggcattaccattatgcttagcggaaatcattgtagttgggccgacctgcaataatcgatatgctttgttcagttcgactggctgtaaagacacacgatttctccttcccataaatgaaaaatgtgccgttatcagcaacggcacatttgaaggcgttttaatacactgatgatcgcctgaagataatcaggctaataccgttttgtatcgtccggcctgagctgcgatttcttcgtcagttatcgtcgcgcttccgcctgtaatgaacggcttgatgtagttcatacccagatacccggagatggtttcaaaagacagcaggtactctcctaccgtatgtccggcagcgccatcaggctgataggcagactcagcacctccaagcgaaactgccagcatgagttgcttgtcgtgcagcgcctgtgtttctccaccatgtgaccagccgtacgtcagtacatcgtcaagccactgtttcagaagtggcggcgtgctgtaccactgcatagggaactgcagcacgacacgatccgtcttctccagggcagcctgttcagcggccacgtcgattttgccatccggatacaggtcatagagataacgcacttcaacgcctgtcagtgatgctgcaccttttgccagggctgagtttacccgggactgattaatgttgggatgggtaacaaatactgttgttttcatagcgatctcttattttttcagaagaatgtttcgtcaatttcaagccgggataaggcttcgttgatatcatttaattcggcgtcactgagctgaacatttgcggcgtgaaaattctcttccagccggtgtagttttgttgttcccgggatcggcacaatgtaaggcttctgagccagctcccaggcaagaacaatctgtgctgaagttgcgttgtttctttctgcaatttcagcgattagcttaagaagcgtctggttattttccatcacctctggtttgaagcgccccatcatgccccggtaatcgccttccccgtaggttgtattagctgtgacctgaccactcaggaatccattacccagcgggctataggccataaaaccaatatcaagttcatcgcagaccttaaacagatcctgttcaggtttacgccacatcattgaatactggtcttcaaccgcagtgaccgggcagatggcatgagcccggcgtatgtaagatacgggcgcattggataagccccagtactttattttgccctccgcgatcagctctttcattaatcctgccaccacttccggctcaacttttgggtcgacacgatgctgataaaacaggtcgatatggtcggtcttcaggcgcctgagggaaccttccagttgctctctgacagatgccggacggctgtctaatatcggcaccagctgtccatcactattttccattcctgtcacgccgaatttggtcgcgatgacaacgttgtccctgtgtttgctgagcgcaacccccagcagtttttcgttttcaaatccgtaaatgggggcagtgtcgaaaaggttgcagcccagctctacagccttgtctatcagctttgtcctttcccggatctcaactgaatagccatagccatggtccatgcccatgcaccccagccccatttccgagacatgaagcccctggctacctaaccttctaattttcacgattatttcacccttctttaaggtattaactattcttagatgctaagtatacggttggatttattgctgaaaaattgttaatttagaaaatcagaattgctaaaatcacaattattatgaataaactcgatgccctgagattttttgttactgctgcagaaacaatgaattttcgcgaagcggcagtcaggctggccatttctccatcagtggtgacacgcacgattgctgatctggaacatcagcttggcgaaccgctttttaagcgcaatacccgatccattgtgctgaccagctttggtgagtttttcttgccccgtgccatgcggctgcttgaagactcagaggcccttttccagacggccagagatgacaatgagatgaagggagttgtgaggatcacgctattccggtttcccggccacgagcaggtgttatatgagcttctgaccgctctcgatccctatcctgagctgtttattgactggcggttagacatgatgaagctggatactgtccagaaccgtattgacatggggatccgtatagagcgggagccaaacccgaattttatcgtcaggcccattacgctggttcatcatgccctgatgacttctccccggctcattgacaggctgggcgcaccgaaaaattttgaagacctgcgtcagcgttaccctttcagcggtctgcttaaccctgaaaccggcaaggtgtttgaatttatgctcgacggcgtcaatacctttattccccggcacctggagttttttaccaccgactcccagtctgagattcaggctgcgttaaccggtaaagccgtgattcagtcgagtaatctggcctgcagggaataccttgaagacggcaggctggtgaatgtcctgccggaactgaaactggaaacctggcagctttatctttaccggccctatcagaccctggtaccacagcgcatcaggaccgtttttcacatccttgaaaatattttactcagacactttagttaaaagagggcccggatgtggctggcgctcttagccggcgtccccccgtaaaccggagatgtgaatttctgggtacagcctttctccgggaagtcgctgctccgggatgctcatatccgcgaaataaagtctgccgttctttcaggttccctgaatactgctgacttttagtatgcaacggggagctgtgacagacgtatcaactgaatatttcatctatccagtctgcaaatgcacgtacggcgggtgaaataaaacgctgatggggataaagcaatgcgacaggaacagacgacggctgccagtcggccaggacttcaaccagcgttcctttctgaaggtgttctgctacaacgttctcagcaagctgcgccagcccgaacccttcgaggcacatttttatatagagtcccgtctcgttgacggctgcctgccccctgacgggtacggacagcgtttctgttccctttacaaaacgcaattcgtctgtacgccggctttgtccggaaaaataatgaatagcccggtgatgagataaatcttcaggtgactgcggaataccgtactccctgagataatcgggagaggcgcaggtgatccagcgaaattctccgagcggacgggctacaagcgtggagttaagtaactctccggttctgatcacgcagtccacgccctcctgaaccaggtcaacctgccggtcgctgacgccgatcatcaggtaaatatcaggataacggctgtagaactctttcaggtttggcatcacgaggaagtgcgctataccgccgggcatatcaacgcgtaaacgaccacgggggcgcctgttcgaatcggccagactggcttccgtatgttcaattaaggccagaatttcccggcactgcgccagatactgcataccttccggagtaaggctgacccgtcttgtggtccggttcagcagacgcacctgcagatatttctccaggtttttgatggtgctggtaacagtagaagaaggcagggacagtgtttccgctgcccggacaaagcttccggcctcagccacccttataaaaacctgcatagcctgaatacgatccacctgattgcgctcctgaatagcatgtgacggtgataaccatcattattcgcaaattctgaatgatgaaaacacgttagtcatctttttcagcttaaacaggaggcgtattgttttccttctgaacctgaaagagacaattcaaatgaccgattactgcagaaatattgttaacaataagacggcaaatgctccggtaacgctgatcagcggtgcaaccatactgagtatggatgagaatgttggtaaccatgaacgtggcgatattcttgtcacagggtcaaccatcaccgccatcggtaaggacctgaacgccgagggtgctcacgtcattgatgccacaaatatgattgccatgccggggatggtcgattctcatcgtcacgcctgggaaggccagctgcgccgcatcaacccaaacgccacctgtctggacgactatagcaatgccacgcacttctcgtttgcgaaatactatcggcccgcagatatctatgtcggtaatctcctgacggcgctgggcgcgattgatgcgggtatcactaccatgattgataactcgcacaacagccgtaccgcagcacatgcagacgccgccgttgaagccctgcttgatgccggaattcgcgctattcatgcttccggcgcgccggtagcaggcgaatgggacagagcgcactggccgggtaactggcagcgtctgcaggaaaaatatttcaaagacaatcctgagggactggtttctctgggcgtcatggcccagctggagccggaattgtgggccgaggcccgccggctcgggctgccaatcgtgaccgaattctttggcgctgaaatggcttcagagcttaaatcattgcatcagcagggcctgctgggcccggacaatatcttcaaccactgcacagcactgcctgatgagggctgggaaatcctgcgtgaagccggcgtacgagtgaacgtttgtccgcgctcagattcgcactatggcattgaaagcgggatgtttgccattgaggccgcgcagcgccatggcatcaatcctggcctgagcgtggataacgaaacgtcttacagcacagatatgtttatggaaatgcgcgtggcgttctatctgcagcgagtaatgggtatgcataagcagcactgctgtgattcagggcattctctgacaacgctcccggcagcgcagctgctgaagtcggcaaccgtcgatggtgcgacctgtgccggactacaggataaagtgggtagcctgacgccaggcaaacaggccgacctgatcctgattaacgctgctgatctcaatctctatccgaacgggaatgccttcgggacggtggtgcatgcaactgaacgcagcaacatcgatactgtcatgattggcgggcgcatcgtcaagcagaacggcaaagttctgggcgtggacagcgagcgtcttcgtgctgccatcgatgaatcacgcgaacaccttttcgccgccgccgggtatgagccggacatctttgcggagaaattcctgccgctggtacaggcaaactgacagggaataacagcatgagcgcgatttattacgtaatagcttttgcagcgggtcttggtattaccttgcagacaaccctgaacagtcagctcgcaaaaggactcgggggcgatccggtcaccgccgcgttcttttcctttacggccggggcgttgagcctcgggatttactcgctgctacgtggcgggttatttagctctctcgctgctattccttcgcagccagcatggagtctggcgggcggcctgatcggtgcctgtgcgttgttcagctacgtggtgctggcaccgaaaatcggtttttcagccctgctcgggctggcaatcgttgggcagttactctcgtcgcagatgattgaccatttcggtctgctgggtgctgtacggcgaccggtttcgctgctcaaactggggggcatgctggtcatgctggcaggactcgccatcatgctttttggtgacaaactttcagcgcgttttttgccctgacagggtgggaatagcttgttactgccgtctgccataatgcagatggccttacgcttttggtcaggcgcgatgcgaaacttttatatgcgggagaaataacatgttttcagtggctgctgatgccagaaatttgctgggagagtgcccaatctggtgcgagaggacacgcaggatttactggactgacattgaaggcagcgagctgcttgcccttgaagaagacaccagtgttgtgatgcgctggtccctgcctgaacgcctcggatcgtttgctcttactgaacattctgacgttttattgatgggactggcgtcccgattcgccttctgcgatctgaatacgggtatctttacgccggttgtggcgtcaccgggaggaccgggaacacggacaggggatggtcggtgcgaccgcgagggtaatttcgtcttcgggaccatggatgacggataccccgcgaaaatcataggaagatttcacaggctaaatgcagcgacactcagcattgagacgctacccctgcctgaggtggccatcccgaacagcatctgtttcagtccggacggcagcacgatgtattactgtgactcgatgcagggccgtataatgtgctgtgattacccctccatgaataaccagcgcgtgttcactgcaacagaaggaaagggagcgcctgacggctcctgcgtggacgcaatgggctatgtctggaatgccgaatggggaggaagccgtgttgtacgttatcgtccggacggaacgacggagagtatcctgccctctccaggagttcagagcacttgcccgacactcgcgggagaagcattcacaacgctgtattgtaccagtgccagcgtgggcctttctgtgccgtcaaggcatgatggagcattgctaagagcgaaatcagccgtcttccccggtttaccggagagccggttttcagcgcacacagcgtaaccgctttgctatcagtgccaacagggggaacagagtctttctcttcaccatattcggttaggcaggagaaagactctggtatttattacagcagcttaaatacgtttataatgagctgcccggggtcagatttgcatttatccaggctgccacgtcggtaaccggaatgttatggcgttcattgaatgtctgctttttatcccatgcaacaccccgcccctgtgcaaaaacggcacgatacttagacatcatgtcttgcgggttgagcgcgagtttatccatcagatattgttcgctccattccgtgcagctgaaaggacggccaagcgctgattgcagcttatctgctacctctgcgtaggtcagtgtatcaccggcgatatacacaatttcgttccggatgcgaggagttttaaatacgatcgctgccgtcagcatcccgatatcatcgggagttgtcagcgtcatggtgttgtcaatactgccgagtgcgtgaacagtatcgttctgcagatcgaccacaccgaagtctggttcgaacaaatagctcatgaagatgccggtcgaaatgatgacccactcagtttcatgctggctgcgtagtaaatcacgcacgtcaatctgcgcgtcgaagatgtcttgtggactgccgcgtccgatggcatcaaaatcggcaccaaactgccatggaaaatagcgtggaatccgcgcctgcagggccgcctgcgccagtttcatcggtgtatttatgccggccgcgtaccccgcgcagccaacgactgtgtcaaattgcgcaaagaggctggccaaatcgtcgacagaactcatgacgagatcgcccgtgactatattaataccgaggtttctgatttccgtgataacgaattgttttccaggttcatctgacgttacggtactttcgcgcagcagcacgctgattttcgttccctccacatcttttgcccgaagggcaagatttcgcagaacggggaggcccagctcaccggcaccgagcacgaggatattttcagacgtagtgttaagatctgttttgttcataatctggccttacatgaattgttgcaccactctagcaattcataacaggctaaaaaagaaggcacatgtatgataccgggagtcaatgaaatggatcgggaagagattcttcagtattcgcaggctgtttgtaaggggctgagagacgatgatgatggcttgcggcgggaggtgctggctcatgccggaagtcgctggtcgctgggtatcgtcaacacgcttggcgtttatggcagactgcgtcatgccgaaattggcaggcgtatgcacggagtgactcagcgcatgctgacgcgtacattacgacagcttgagcgtgacggactggttatccgccatgatttcagtgaaatcccgccacgagtcgaatacgaactgtccgatacaggtatggagttacttgtacggatgatcccgctgtggacctggattgtcgataatgctgatcgctttcgtgaagaccggttgagatatgaaaaaaataacagtaacccggggacgtaactggccatgaatataaacatcacttttcatggtttgtaacgaatacaagtatctgaatagataagccttcggatatgtatgtatacagtagtcatccggagacagaaccgatttcaccgggctcggccgggatggtgtaattaaagaggattagattttacgtatctctatcatcaatatcagtcggtgcatatttcaaatgggtgttatagcgaatttgattttcgccaccattaattcggccttaaaaattatctgacaggatgacctatcctttcagaataataggttgactggcgaaacaatattttaaaaactggtgattttttatgattcctaaaataaatagtgaagtctcttctgattatcatgatctgcctggttatattcatggggcgaaaattatccaagtcgctttgactaaacaccctatagacaatatcagtgatgttgtttatgagacagtgaaaaacactcgttctgtcaggcaattgcatatgtcttttctggttcctcgtaccaaaattttgaaaccagccatcatctattttcctgggggaggatttatgacagctgagcacaataaatttgtggaaatgcgcatggctttagcggaggctggctttgttgttgcagcggcagaatacaggacaattccggatactttccctgcgccagtgatagatgctaaagcagcagtaagataccttcgtcaacatgccaacgattatggaattgacccctcacgaattggtgtatttggcgattctgcaggaggatggctggcgcagatgcttggtaccactaatggcgataaatcattcgatcacggcgattttctcagccagtccgctgatgtgcaggctgtggctacgctttacggaatatcagatctgcgtaacataggtgacggttttccggatcaccgacaaaaagtgcatcagtctcctgcagtcgcggagtcactgctaattaatggtgtggctttcaagaattttgcaggtgcctccatcagttctgtacctgaaaaagcgataaatgcaagccccataggacgtctcaaaggatgtaaacctccgttcctaataatgcatggaagtaaggatacattagtatcgcctaagcagagcgcaacgctttacaaagcccttttggaatcggggaacaaaacggactacgtacttatcgaaggtgcagaacacggtgatgatcactggtatcaacccgttgtcataaatagggttgttgactggttcagcgggcatctttgtcctgataatacatgatgactgacgctctgttgaatcactcaaactgttgtcagcaacgtccgcttcacgccctgagacatttgacaagctttttacggcatcagtaagagcgattttcgctcttccaatgccagcaaaatagttagcgaacgtggagcacttactggctcgaaagcaaagcggcaatcatcaaaccgcatgattctggcacaatattcgtaaccagtaagcgcataccctgaatcacttaaaagtgtaactctctgggttcgaatgactatatctggcacaggctgtgtgaaaactctgccctagaactgaagtgcgcgcatctacgcaaaatctggaattgctcgactggttagtttacgtatgagcgcagttttcagccctgttttagtcgcagtttaatctaccaaaacagttttcacacagtctgggctcggagcggacaggctcaggagtatgatgtccgctataagcgaacagcggaagttcgcatagaataaaaatggcaatgttgcttacatcgtcagagctggcagtgaaatgttgaccattttgcaggatgttcgatgaattcacgcaatgcgtcgagaaataccgtgactctggcaggtgggtgacgtaacgcgcgtagcgcatatattcctgtagatacatgtggttgcgatgacatttccggaaagagttgtaccagcgcgccactgttaatgtcatctcccgccacccagtccggcaggaacgcgatccccatcccttcgaccgctgcctgacgcattgcttcgaaatcatcacagccaaacataggcaggcccgagttttctctggccggatggccaatcacgctcgaccagcaaagcagatccgcaccgtgcagcttatcgattaaccgatgtgaggcgatgtcgtccagcgaggcgggaatccccgcgctttccagataggcagggcttgcgcacagcacacgtatttgcgttgctattttgctggcaatcaacgtgctgtcggccatattaccaatacggatgacaacatcaaggcgttcagcgacggggtctgccaaccgttcggtcagatccaaatcgaagctcagcgccggatactgtcgggagagttttgccataaccggcagcacatagcgtttaccaaatgtgggataacacgccactcttagcacaccggttacttcgcccttcattgacgccagttcctgctgcgtatcctccagtgaatcgaggatctgtctggcgcgaatcagcaacatttccccggcatccgtcagggttaaatgccgtgtagatcgcaaaaaaagcggggtatcgaggtatgcttccagcgcatcaatctgccgtcctatcgaggagggcgtgcgtccgcgacggcgaccagcacccgaaaaactgctttcacgggcgacatcgacaaagactccaaggaactcggcaaatttctctgattgcatctgtgcatttcttgcatagctgttgtggggagaagccatcttatcagtgatgtgcgctgaacttaagatcccctcagccgaatgacattacacaaacacgcacacactgaggataacgaccatgcaaaatcatcaatacgatcccctttatctattcatcgacggtgactggattgaagcgggcaatcgcgacactgtcgctgtgattaaccccgcaaccgaagccactatcggccgcttgccgctcgcgaccgccgccgaccttgaacgtgccctgtcagccacccgttctggctttgacatctggcgccgtaccgtgcctgccgaacgcgcccgcatcatgaagaatgccgctgccctgatgcgcgaacgcgctgaacatattgcctcgttgatgacgctggaagaagggaagcccctggctgaaagccgcgacgaagtattgcgtgcagccgactattttgaatggtttgcggaggaagcccgccgcattgatgggcgcgttgtaccgtcaaatcgccccggtgtactgcaactggtcaaaaaagagcccatcggcccggttgccgccttcactccgtggaatttcccggccattaccccggcacgcaaattatcagcggcgctggccgcaggttgtagcgtgatcctgaaacccggtgaagagagcccggcgacggcgctggctctggcacgctgcctggatgatgccggtctgcctgaaggcgtactgcaaattgtgtttggcgtaccggatcaggtttccgccacgctgatcgcctcaccggttattcgcaaagtggcattcaccggttctgtaccggtaggtcgactgctgtctgagcgtgctgccgccggtgttaaaccgattaccctggaactgggcggccacggaccggtgctggtttttgccgatgccgacattgatgcggcggcaactggcggagcggctaaccgttttcggggcaccggccaaatctgtatctcttcaacccgttttcttattcagcgaggtgtttacacacagtttgtcgaacgcttcgtgagtgcgacggagcaactgattatcggcgatggcatagcggaaggcactcaggtggggccgctggcgaatatccgccaactggaaaaaatggaatcgctgattgccgatgctgttgccctgggcgcgaaagtgctcactggagggaaacggctcaaccgtcctggctttttctttgaacccacggtgcttaccgatgtgccgatggaagcacggatcatgcacgaagaaccctttggcccgatcgccgtgatgcgtccgttcgacgcgcttgaggacgggctggcagaagcaaaccgtctgccgtatgccctgtcagcttacgcttttacgcgtgacgcccgtaccgtgctggatgttggcgatggccttgaggccggaatgatcggcattaatcagtaccgcatggtggcgacggaactgcctttcggcggcatgaaagaaagcggacatggttcggagggcggtcgggaaggtctcagccattatctggtgaataaattcatcagccaaatctaaaacacactggcactaatgacagaatataagaggaactgaccatgaaagctgttgattttactcgcccgcgtgaagctgcacgcgcatttactcctaaactgtccggcttcgttgagcaaccactgtattccgatgtctggacagatccggacctggcaccacgcgaccgtagtctgattactatcgcctgtcttatcgcgctgaatcattccaatgagctaccggcccacctgcgtcgcggcattgaaaacgggctgaccaaaacagaaatttccgccctgattacgcacatggcgttttatgcaggcttcccggcagcgattaccgcttctggttatgccaatgccacgtttgaagaacaggcctgaacgacggctatccatcttcttatttcgggaaagagaatcatgaaagcaatcacttttgaacaattcggtccggccgatgtacttaatatcagtgaagtcgcagacccacagctgcgccccaatgatctgctggttcgcacgcgggcagcgggggtcaaccgggccgatctaactcaccgacgcggcgggtatggccgccctgattttggcgactcgacgattatggggctggaaatcgccggtgacgttattgccgtcggggagaatgtaaaaggctacaacttgggtgaccgtgttatgggtatcgtcgggggcggggcttacgctgaaatggcccgcattgattaccggatggctatgccagtgccggaaggtatggactatatccatgcggcggccattgccgaggtctttgtaaccgcgcatgaagcgcttatccatctggggaaactgaagcccacggaaacggtactgatccacgccggggccggcggtgtgggaggtgccgccgtgcaactggcgcatgcgacaggcgcgacggtaatcaccaccgcgaatgctgcagcacacgatctcgttcgccgtctgggtgccgatcacgccattgattacgtgacagaagacttctccgaggttgtcgccagcagtacggataacaagggggttgatcttattctcgattttattggcgcgccttattttgaacgaaacgtgaatgcactcaactttggtggacgtctggtgcagattggcatcatgggggggattgaaaacgcgaagatcccgctggatcgggtgttgtaccgccatctgcagattatcggtacggtaatgaaatcgcgttcgcaagaagtgaaacatgagatgtcccgtcgctttaaagagtgctggttaactcgcttcggtaaagatgggctgagcccggtgattgacagcgtatttccgctggctgaagccagcaaagctcaccagcgtatggaagacggcctcaatgtcggaaaaattgtgttgacgatgtagaggacgcaaacaataaggcgacttttcctgccttttcgtcactaacccccttcgctatccggcatgaacagcccgcgcaatattctctgggctgttcaatgtcagaggatgtatgaagtaccgtcaaaaaagcatcactaatgggttaaaagtgataccagagtattgctgttacattgtttgtcaaagctaagttcagatgtccgctcatggcaccaaactgctgtaggtgaagcccatcaggctgcttcgagcgaaaagcggacatcttaagtcggttgttttttatactattacctctatgtagccatgttatatggctacatttatacagaagtaaggattagtcttttcctggaccataattgaattttgtacctttaccaatggcgtaaaactgtccgccagctacgtaatggacagtacgtaattcatcaggcgcatcatcaaaaatccagtgcccatttctgaaaactcggtcatcactccatgctccgacaatttcccccatgaacaagttgtgctgtttttcattttctacattgggtatgaccttacagactagccagccagcgcaaccttcaactaaaggaagatcaaactctttctgataaaatagtggaattttactgtttttatggggcgtctcagaatagctgtggcctccagcatataaaaccatttccatctgttttactacggggatctggacaacgtaatatccacttttttctacaagtctgcgagtaaatgcctgtggacctataaaagccattactttattatttcctactaaccccacccaggccgctgccatgacattttcaatgccatcatttttagccgatatcatcgtcgttggcccgacctgcaataaacgataggctttgtttaactctactggttgaattgacataattttctcttttgagttctgataaaaaagtaatatagattacttatttgattgttcgattatatgactggaatagttgcaaattaattgctattatcaaaatacattattgcaatttccacaacaatcatgaacaaacttgatgccttaaagttttttatcatcgcctctgagaccctgaacttccgcgaagcagccgtcaagctgtcggtttcaccatcagtagtaactcgaacagttgctgagttggagaaacagcttggtgaacctcttttcaaacgcaatactcgttcgatctttctcaccagtttcggcgagctatttttaccccaagcgaagcgactgctggaagattctgaaaagttatttcagatggcgaaagatgataatgaaatgaaaggtattgttcgtatcacattacttcggtttccaaatcatgagcaaatattgtatgaactgttgactgcactgcgtccatatcctgagttatttatcgactggcgtttagatatgatgaaacttgatactatcgagcatcgtatcgatataggcatacgcgtagggcgagagcctaatccaaactttatcattaaaaatatcgggcaagttgaacatattttggttgcatcccctgaactcattgcgcgcctgggagcaccaactgatttagaagatcttcgacagcgttatccatttagtggtttaattaatcctgaaacggggaaatcatttgagtttatgagtgacgcagtgaatacttttgtccctcgtcatattgagttttatactacagacccatacgccgaaattcaggctgcattggccggaaaaacggttgtacaatccagcgattttatctgtagggagtacttagcaagcggccaacttgttcccccactgccagaactgcgacaggagaaatggcagttttatttatatcgaccgtaccagctgattactcccaaaagggtcacggtcgttttctcgctattagaaaaaatattacgcaaatatttcacatcaaaataatattttcctcaacgtctgcttctggcacagagctgtccacggctacgatcaaggacagctttgagcgaacagcggaagttcggaacgtatacttacatcgaggcgtcttgagcaatggggtgcaggtcactagcataaaaggcgcgtcaggttttccgtattcgctctggtaccttcattgtccaatgcacttatccgcgacttcgttttctcgatctcatgagagactcaggcgacatcttcagcttttgcgcataggacaatcaccattccgctggtatcgacctccacaatgtccccaggttcggcatgcatgctactgatggagacaggctggtttactgacctgtcccctgtccctaccggatcacataaagcgacctctggtaaacatcgaatacatatatcatgagctgtatcgtgctgacgtccgagttcggcatcttgctaagcatcttaatcgcttgtgagctatgacctcctgacggcatagaatctatgcatctttaagagtacccaagtatagaagcatagctttcagtaattattgagtatgaaggactgatcaaaagaaacaatataggtaatcatcataaaagttatttctctcgtactaaataaccgttatagactgaaatcacggaacgattgaccgaagtgaaatcaacattcagcaattcaattaacgggggagcgaccatatggaaatccacaaccggactccaaatgtatatgacctgcttgaaataaacaaaatcctactttcaacttcaaataatggtgagtcatttgagaaagacttacatctcaatggattcatagaaaaaccatggggatatgagtatagagtttattgtgattctatttttgatgtatggcgccttcatatatcaaagaatctatccacttcaatgcattgtcatatactgaaagacaccgtccttatatgcctaaatggtgatggcgagaccagatttcttgatggtacacatcaggcgttaaaatctggcgacagcatatatattgcaaaaggtgtgttccatcagactatttctggaaaatcaggcatcgaattaattgaagttgaaaacccaagaaacaaattcgacttactcagacttaaagataattatggccggcaaaatatggcatatgaaaagaaatcacaggaacatgatcttttacctcctttgcaacagatatctgcaggcacattgatcagagaacatgacctacacaaattagcatacttctccgtcaaaaatcttgatagaaaaatgttgaatgacgaggatgattttatttttatttcattagatgtaaaaagccatctaatgggaaaaattcatatcctacgagctaaagatgccatctcagaaatgtactgtggtcagaatgtatttttaattaacgtcccgtaacgcaataagaaggaaaatgacatgtctaatccgacacgagtagtgataatcactggtccaggttttcaggatcacgatgtagtttatacttactatcgttctaaagaggaaggatacgatatatctattgcaacaaaggatggaagtgcagtgatagggaaatatggcatcactgttcctatggataaaagatccaaagacaatattaattttgatcaactcaacgccactgattttgatgctgttattctcactggcggtcatgaagcgcctgatagagttcgccaagatcagagagttaaagattttctaaaacagatggtaacacaggggaaagttgtggctgggctctgccatggtccctggattatgatttctgccggtattctaagagacaaactcgcctgcgcttatgttggtctgaaagacgatatggttaattccggcgctaacgtaattgaagcagatgtagttgtcgacgggaatatcataacttgctcctattatgccgaatgtggaaaatttatgcgtcagacattcgatgcaatagatagatggaagcgcggagaaactcttaaagaaccgctggtggtataattcgatgttaatagcaatggatttcgacggggtcctggttgatggagtagacgaatgcatgctaattacatggaatgtattacatgacagacctctcagtgattttaacaaaaatgtacttcaaaaaataccaagtctgatggctaaacggttcaggaaattaaggaattttgtacgtcacgacggtcactttatttcctcattcaccgaatttggtaatgaggctatagataatgacagattcactgccatatatgaatcgattccaactgaagaaaaggaaatatttagggataagttcatccagtataggaacctggcaagaagtatctaccctagtttttgggctgaactacaccgtccgctattggatgtttcaaatttatttgaaacatctaatgatatctatattgtgtcgggaaaggatgaggagtcaatatcattcattctaagtaaatatggtttaaacatacccgcgaataaaatttatgggaggatgaccgataaaaacaagactctcaccttgctaaaatcgatagccttcgataaaaacgaggagattatatttattgatgacaatatccaaaatgttattgatgcattagatcatggcattcaatcattttgggctaattggggatacaacatccctgagcataaattaatggcccttcaaaaaggaattaatgaattaaataccgaggatctcttgaaattagtcaagaaaccctcttaacgcgatattatttcaatttttctgtatgaggagtaataacccatggcgaaagaaatactatgtggttttggagtgggtgtagatgccgttgcaggctggctatcttcttatgggggagaggattctccaagcgatatatctcgcggtatgttcgctggcgaagtaggtactccacgtcttctgaatctctttgaccagtttaatattccaacaacctggtttatgcctggtcattccattgaaacctttcctcggcaaatggaagcagttgttaatgctggacatgaggtaggggttcataattacagtcatgaaaacccaatatctatgtcgcctgaccaagaaagagaagtccttcaaaagggcattgatatggtcacaaaattaacagggaagagacctactgggtatgtcgctccatggtgggaattttctcctgtaaccacagatcttctattagaaaatggcatcaaatatgaccattcactaatgcatcatgatcatcagccttattatgtcaggaaaggtgattcctggaccaagatagattattccaagacaccgaccgaatggatgaaaccgctggtacgcggagaagagacggaccttattgaattacccgccagttggacaatcgacgatattcctcctttcatgttcatgaaaacaaaacccaacagccaaggtttcatgaatcccagggacatcgaacagttgtggagggatcaattcgattgggtctaccgtgagcatgaatatgcgatctttactttcacgattcacccggacgtatctggacgcccgcacgtattaatgatgctcgaacgcctcttaacgcatatgcttggtcatccaggggtgaaattcctaaaattgaatgacattgcagatgactttgccaagcgattgccacggataaaataatgacacggcagccgataaggctgcctgttttatgtatctcaaaccataaatccgctattttttgatagttcgagaattctgtctctgattcctgatacgagtgggttacgtaatgagctatcaatccataccaaatagatagaatttatggggagtctctcatgaacattgacttcaacgatctgacctcctgctatgctttgggcgcataaatactcaggcatcacagtccaaccaatattttctcggatcattctttctaaaattcgcaaatccggtacagtaatagacggacgaagcagtgcaaaaaatcgcgaagaatcctggaaaacctcccttatcaatggtaactgttcatcataagctattagaggaagcttcgacagcgtatcaatcacgtcctcgttttctttgaagttgtctgctataagtgacgctaccacaactattaacttttccattccaatttcagcatatccaaatttttgtttatccggcatagaagttgtgaaacctagttgacaacttccgtccagaagacaggtgtatatgcgcttcctatttcctgtcaaaactttaaatttaataccttcattgaatagttttttcaccaagtacggtaattttgaccacattaattctgctggcccgatgaaagatactgtccccgaggactttcttgtacgtgatctaagcatcgacaacttcagttcaattgtttctaaatctgaagccaccaatctcgccaattcctccccatccactgtagccaccacaccatgtgaacgacgagtaaagagaatacacccggtaaaagcctcaagtgaatgaatgtgggcagacattgcaggctggcttatgcccaaccgcattgccgcttttgaaatcgaaccagctttgtatacttcaacaaaacttcgtaactgaaccagatagctcatactgcgcacccttaagagcttgaagctctccgattacgacataaaatcgaaagcctgcacagtattatgttataaacatgtttcgttaatgcttctacacatattaacttattttaacaattaaaggatcttatagggcaaggatagcatgtagcaatataacgaattgatattattacattttatgtgtgttgtatctggctggcattaaggttccacgcatgccataaggttcggattggcgtgttattttctataaaatattctggggattgataggcgctaaacctttaaattggctaaaaaatcattgtatttttatctattaacgttgacaacctcaactcaaatcgagttatcacaaattccgttggtcagcgaagcggttagcttctgttagaccggttcggactacctttcggaacattaatcatcatcccatggtgcccgtttccatttttcagtcatgaaatcgataaatacacttagcctacggggtataggttctcgccgcgcccggacaacactgatctgagatgtgtttgcttcccaatcaggcagaactcggcaaagtttcccagccctcaattcatcatgaatatcccaagtttctcgaagagatatgccaagccccgccaaactccaggcatgcaatacatctccgttgtcactgataaggttgccagtaacgatgatgtttctttcatgaccggctttacgtaacgtccatgaattgtgtaaaaaacccgggtaagcgaatactaagcagttgtgatttaaaagatcttctggtcgctcaatagatggatggttcttcagatattcggacgatgcgatgagaatacgtctattatttgctatttttctggccagaaggcgagaatcagccagatcccccatacgaatagccagatcgaaatcaccactgtaaagatcctggatttggtcagataaccttaaatcaaagcccaccctcggatgtacttggcagaatgcagcgatcgcaggagcaacatattttcggccaaacggtgcgggcgcagtcaaacgaatatttccgcttaactcctcactatcccctcgggaaagttccttcatctcatccagaacggccaacgctacgcgagccctctcagctatagccctaccctcgtctgtaatacgtagattacgggtgtttctttcaaaaagtgtagtgccaagtgcagtttccagcctcgctatctgcttactcaccatcttggggagtatctgtaggtctcgtgctgcggcagagaaattgtttctgtcgacgacgtgtaaaaacacttcaaggtcgtcatttctcaagtttattttgttcattttggggtaagtgtttgtccgtttaggtctatttaaaggataaatagattgttccacaataagactcaatatgacaagtctgttatgtcgcatgcagtcagaagaattttgctttaagtccccccatatagaggaagttaaaatgcctaaacgcatcctgtttgtattgaccagccatgaccgtaaaggtcaagccgagagtaaagatgccgcacccagtggtttctatctttctgaggtatctcatccctacgatgtactcacaaaagaaggatatgaagttgatttcgtgagtcccaaggggggcaagacacatgttgacggtttagacctcagcgatccggttaacgcctccttttggaataatgattccttacgcgaggcaactaaaaccacattaaaaccctcgcagattgatcctgacgtctatgacgccgtcttctatgcaggagggcatgcgacgatgtgggatctccctgacaatatagagttggcgggtgtttcatcacgaatttatgaaaagggtggcgttgtcgctgcggtttgtcatggccccgccggattggtgaatattaggctttccgataatgaatatctggttgcgggcaaaaaggtgtcagcttttaccaacgatgaagaacgtgctgtagggttgtacgacattgttccattcttacttgaagacacactgaagcaaagaggtgctgagcatcttgcagccgcaaattttcagccacaggtgattgtcagccagagattagtgaccggacagaatcccgcttccgcaaaaggagtcgctgaggcaatgctgcctttgttggcttctattgaaaatagaagagcctgagttatgaaagaacgcatgccttttgttatatatgtctttgcactctgcgcttttgctttgggattcactgaatttgtcacgatcggcttagtttccaggatatcagctgatctaaacgtcagtgtcagtcatgtaggtacagcggtgacagcctacgccctcggtgccgtaattggtgctccgggattaactgcgttggcaacacgatggcctcgtaaaagattattacttgttgctatgggcctgtttacagttggcaatggtatcgtcagtgcgtctgagtccctaacgcctatgttgattgcacgatttgcttccggtttagggcacggagtgtttcttgctgttgcttcaagtgtggcaacccaactggctgggcgacatcgtgctggcgccgctgtttcggtcgtttttggcggtcttacaattgcgttggctttaggcgtaccacttggtacctacatcggtagtctgttgagttggcagtctatattcatggcagtaacggcaagtggagcgatcggtttcattggattggcaatgctgatgcccacggatcaaaatgatccctccttgcaagcaaatgccatggacggtttaaaagccatgttcaacccactgctgcttgcgggagcaggaattacagttttggcctatgcaggatcttttgccctgtatacgtatatttccccgattctacttcagataacgcatgtagacgagcgtacgagtagtttgcttatgttggtctacggcgtgatggccgctatcgggaatgtctggggtggtcgcctgactgacaagcaaggtgcagaccgtgccgtgatgacaattcttattggtctggcgatcgtcctctttgctatgtggttctctgcctcatccttaatgttaatggcactgtttattggcttgcttggggcattgacatacgcagcggttccctcaatgcaagcaagagtgatagggctatctcacatacatgcacctgaagctccagctgtggcagcaggactgaatattgccggttttaacggagggattgcattagggtcactattggggggtgtagcactggatgttactggtcttacaagccctacttgggttggaggcggagtagtaatcgttgggattttgtggatgttattacaaataaattctaataaaagacgcaccacctccgattattcctgatagtacacatagcattcaaaatggctcagtgaacaccaaatcactgagccattttattttacctctttgaaaaatgtcacaaccaaacacaggtttttttattttataaaatcaacctatatcattctgatctatttcatatcaatcagaattttaaacatctttcaaaaacacagcgaaattcatcagcaatatcattgtgtgaaaggagatgtattatgtcagtcaatccaactttcctaaacattagagatggaattccagactggataactatcagggaggcggtaagacttctcaatggattgaatgggtgtaaaataagaaaaagtgatttttatcgatttgctctgcaagggaaaattcggctttcaatatattttcaatccccagtaacattgaggaaaattaaatcacaaaatcataaattaaagctaagaccaataaaaagctcgtcaacgatgaaatcattcacgcttgccgaaagttcctttgtcagcgaaaacaatttaactttcagtactgaaggaagatatatccatcctgtacaaagagtcattgacacaacattactcggctatgaatatgtccttatacagcgtttacttgcacattcattaaagataccatcacctgtaacaggagcaacgtcgaataattatggcattaccgtttgtttattgggggaaacgtttcaacttttcgaaaagatgacatggcatgaaaaaatcgaacgacacgtaaaaaggctacctaaagatatttcatcagatgattacgaagatataatactaaacactacaaagaaagattcgcataaatattattttcctatgcatgaattaccgagtgatgcctgctttgtcctcagaaaaagcgaactcgataagttgatcaacaaaccaatcgaaaaagaaatgcttccaccatctccaactcggatatccacccctctggcacgcctcttctggctggcctgcaaaaataatgaaactatcagtccgctaatcatgcaaccgtataaactattgtccatttttgaacaatgggcatctgaggaaggcattactgatcgattcagtggtgacacactgaagactgcgcttgagcgcggctctcccccttccataccaatacaaaagtaagatgatctcccttagctatgaaaacccgtattaaggattgtattttccgtaatacgggctcatcgactttctccacaccactgctttgtgttgtcgtgttatctcccggctagtgctatatctgccacaggagaataccgtgacatctcatcagttattgcgtctgaaacaggttgaaggaaaaacgggcctaaagcgctctcaaatctatctgtatatgaaagacggcaccttcccccgctcaatcaagattggcccggccagtgtcgcctggctcgaatcggaaattgacgaatggatcaatattaaattagtccgccgctcaataggctgaagggagaaaataccatgattatcccatcacttaattacgccgtattaaccgatgccctgcatgcattgaaggatggcaacattcgttactgtgaatcgctaggattcactttcgacgaaatgaatgccctcaaccaattatcactagacgagctgtttatcatgagtcgggagtctgcgcagtttttggctgtgacggttcatcacgacgcattacacctgcttctggctaaatcccgtgaggaggtgctgcagcaacagcgtatcaaccacgccatccgactgggtgggtcaattgcgctactcaacaagtattttggcctcacctccaacgaagtttgccttcgccgccggttactgggcgtccgtgtaccttatggccggacgcctgagccggacgaagatacggatgcggccatctggcggcaatggcaacaatgccgggtggccaatctggaatcgaccgatgcgctggtcgccatgatgcaggtaacgcaaaccctgctggcgaaagtcgaaggattgtcactgaccatcgtctggaagcgtatcgaactttgcgagcgggaggcgtcagaccggagggccgcacatgccggatgagatcgaccgcgatcaggaatttaatgagcaacgactggtggagatgattgaacagagccgttttaagccagggtctacgccatcattattccattgtcgcgtatgcggtaagcccattcctgaaaagcgacggcaggcactgccgggcataaccacctgcacggaatgtcaggaaaagcttgaacgccgaagacgttaataatggccacagagacatgcaggaatatttcccctgcatgtctctatcattaactataaatacacagtcgtctttattaactatttcacttcctgttatctcgcagagtttaccccttccactgctaatttatctctctcattttaactttgaatttatcgtgtatatgccgccccggatatctgatcctgaaagcgtcattacataatagttacccgtattgacgttaattcgcctgaatcaggcattgctctttaaaaataaggtttgggctgtcacgaaaccacaattcagggtgccgctgaatgttctcgctgacccgttaaaaccggaatgcagaattgggatgtgacatttatttaactcaccgttgtttttattagaggaggcctcatgcgaaaacccatttatcacgtatttgtcacccaggaaagtcggcccgacccagagggtgaaacaaacacctggtggacgaaagtcggtgtggcttttgcccatcacggtaaacccggcctgaacgtggtactgacacctggcattgccgtttccggaaagctggtgctccttgagcccagggacgacggcgatgcgacacaggatactcaggccatttaaccgcccttccccctttttccggtcctgtgccgtctgatggcggtacgcgttgcccggtttaccgttccgaggccaccatgttttccacctccgtgtttctggcggcggccatgcagtgcgccgccagcgttcacccgtctacggcactcgatgtggcgcgggtcgaatccggtttgaatccgtatgccattgctgaaatcctgcccggtggcaaaggcgtgatttcacatttccccgccagcaggaatgaggccgtccgcctcgctggacggctgaaggcacagggtcgacgctattcggtcgggctgatgcaaatcaccagcaccaatttccgtcattacggcgtgaccgcccgcgaccttcttgccccctgtaccaacctgtccgtctttgaacgcatcctcaccgactgctaccgccgtggcggctccctgaagcgtgcgctcagttgctactactccggaaatttcacgaccggccaacagccggaatccgcgtttaaccagaccagctacatccagcgcatcggctacgccttgccgtcaacgcgggaagaccggcagcgacctcccgccgaaaatctcatgctggcaatccattaccccgccgccgtcatgcgtggcgagcttaccgataacgccacgccagttctgacatccctgcgctaccccaatgccgtgatacgcggcgcgttacccattcccggcccccaggaggaacattgatgaaacgaaaacagactgactggcccgccctctcttccttgttaatggcaagtccggtgctggcagcagacagcggatttaataaagccaatgagacgctgagcaacacctctaccggtctgctcggactggccgccgtcaccatcacgctggccaccatgtgggtgggatacaaagtcttgtttgacggcaagagcctccatgacatgcgcaatatcatcattggcgccatccttatcgtcggcgcgtcaggtttcggtgcctactgggcgtcataagggaggtaacgatggctacgctgaacaaagcgctgacgcggcctgccgccatagccggcattcccctcgtgccgttcgtgatggtcagcggggccatcgtcctgctggcggtctatgtcagctattacctggtattactgcttattcccgcctggctggagatgaaggtaaaggccagaaccgatattcactatttcgggctgctctggctggcctttaaaacccgtggccggtttggcaccaataaacattttggtgccaatgccctgctggcaaaccgttatgacgccgtcgacgtctcggagtttattgaaaagatgaagttaaacgagcgcgttacgctggagaaatacattccgtattcctcccatattcacccgcacgtcatcagaaaccgccaaggtgatctggttgccagctgggagctggagggcaccgtttttgaatgcgaggacgaacatcacctgaccttaatggcgacgcatctcaataacgttattcgggcgtatgaaggcctgccggtcactttctatcttcaccgtatccgggaaaagtaccacgatgcctttgacgcgaattcaggcattcccttttctgatgaagtgacccggctgtattaccagccgatccacggaaaaccgttctggcggcaccggctgtttttcaccgtctgctacgcgcccttctctccgctggagaaaaaggccatgaaggcgcagccgtccggtaaacgcaaagcggcgctggatgatgccctgaaagtgatgctggaacaccgggaggcgctggtatctgctctgtcccgctatacggcgacgccgctggggatgtatgaagacaacgggcgggtgtattccgcccagctgtccttatatcaccgcctgctcaccggccagtggcaaaaggtggcggtcacgcgtgcaccgttttatgaaacgttaagcacgccggatgtctttttaaccaccgacaccgccgagtgccagacagtcggcggctcccgctttttccgcagcctggaaatcaaagattactcgcctgaaaccgcgaccggcctgctggacgcgctgctgtatgccgaaagcgagtatgtgctgacgcagtccttcacctgcatggcccgcgatgaggcgcagaagcatattcgcctgacggaaaagcgcctgaactcggcggacgacgacgccatttcacaacgtgaagagctgattgtactgcgtgacctgatccagtccgggcatgtctcgtgcgggaaataccacttttccctgctggtatcctcagacagccccgaccaggtggtcaaggacaccaacgcactggcgcagcctttcgccgacctcggcatcatgacggcgctgtccacgctgtcgctgcccgccgcgtatctggcacaactgccgggtatctatacgctgcgcccccgtctggtggccatcagcagccagaactttgccgacctggcgagcctgcacaactttcattcccacaagcggagcgacaatccctggggtgaagccatcgcgatactcaaatcaccgggtggtggcgggtattacctgaacctgcacgacggtcaatgcagacggaatgacttcaacgaaaaaacgccgggtaatacggcgattatcgggaaaaccggctcagggaaaacgatgctgatgaccatgatgcagcagctgatgcagaagtaccgcaatccggcgaccttctccgcctcaaccacaatccagcggttcaccacggtgtattttgataaggaccgggcggcggagatggcgatacgccagatgggcggacgctacttccgtatccgtaccggcactcccaccgggtttaacccgttttcgctggccccaacccggcggaatatcagctttatcaaacgactggtgcgcatgctgtgcggccgcaacggcaagccgctcgatccgcgcgatgaggagcggatcagtgccgccgtggataccattatgctcgactacccgccggaataccgcaagttcggtatcacccggctgctggaagtcctgccggagccgccaacccccgccgcccgcctcaacgggctacgtattcgccttaaacagtgggcgcagggcggcgagttcggctgggtattcgacaatgaggaggacaccttcaacatcagccacgttgataacctgggtatcgacggtacggaatttctcgatgatgacgatattcgcggccccatcacgttttatctgctttaccgcgtcaccggcctgctggatggtcgccggctggtgatgttcatggacgaattctggaaatggctggccgatgtcgaattttcccgcttctcgctcaatatgctgaaagtgatccgcaagctgaacggcatcttcgtccccgccacccagtcacctgacgaaatcgtcaaacaccctattgctccggcgattatcgagcagtgcagcacgcagatttttctcgccaacccgaaggccagccgggcggattacgtagaaaagatgaaagtgcctgaaagcgtgtacgacatcgtcagaaacctcgatccgggtgagcgctacatggtggttctgaaaacgccgttacgcgcaggagaaacccggccttttgtggcgatggcgaaaatggatttatcgggtctcgggaaacttaccaaaatgctgagcgggagcgaagacaacctgaaactgttcgacaccctgtatcaggaaggaatgcagcctgatgactggaaagccgccttccttgaacaagccctgtaatattcatgacggaggtaatgaaaatgcggttcagagatatcatactggcgttatcgctgtttatttccacccaggcgatgagcgccggaataccggtattcgacgccgtacagaataccgaatccatgaatcagtggatccagaaactccagcagtggcaggaaaccgtcacccattacagaagcgaacttgatgcctacaagcagcaattagccacagcaacgggcgtgcgggacgttcaggcatttctccgcgaggccaaaagtctgaaaaccgatattgataatcttcgtcaaaacggtatttcactggatgacctgctgagcaaccagagcgggtcatattcttctgaacttaatagcttgtataacaaatataaaacattcgatacctgtaacccgtccagctcttcacaacgctatctggacagctgcaaacagatgatcctgaatcaggccgtagcgatcgaaaatacgtccgaggttgaaaacaagatcacgggtacgctcggcgatatatcagatttatcagaccgtattgctaatgcgcaggattcgaaagagtcacaggacctggctaacgccatcgcggccaaaagcgtacaattgaatgcgctgaccagccagtgggagatgtcagtcaaacaggctgaacagcgagcaacgctgctggaacagcaaaaacagaaagcctttgagcaacagcaattaactgcgcccgttgccgatctgaactctctatagggaggttaacatgttaaaactcgtattaaccttatgcgtcatgtcaggcattctcgtcttatccggttgtaaagagacgaaatcagaagcctggtataaagaacatcccgatgaaacctataaggtctatacgcaatgcctcacggatggcgaggcaagcgacaactgcgagtttgcgcaccgggcagcattaatgtttgcccagacagggaaacccgacatcagggaaaaattcgagacgctgtttcagcaggaagcccaaaaaagaaaatccgtcactcagtaatattcccgccaacaaaaacagggtccctccctgtttttatcccctgtctgttcctgactaatgagaggcaccatgtccggtggtatttttgttggtatggacaaaaacatcatggatggactcaatgccgtgttagaaggtcagtcttctacctacggcaccctaatcagtgtgattatcgtcagttccttcaccctgtttattacgtatcgcgggtatcagacgcttggcggcaaactccagacaccggttgaagatgttgtctgggatgtggggcgcatgttgctgatcaccacctttgttttaaaccgcgatggctggctggatgccatcattgcggccattgaagggcttaaggacggcatcagcggcgatgataatgtctgggcgctgctcgacacggtgtgggaaaaggcacaagcgcaggggcaaacgctgtttaatctcgatacctccacctacgttaaagtgaatggcggttttgccgaggtgctggtctggggcggtgcaatcgttctgttactggctgcaacctttgtcaaccttctcgccgaaatcaccattctgttaatgaccaccaccgccccactctttattttctgcctgctgtacggttttcttaaacccatgtttgataactggctgaaaacaatatttaccgcaatcttaacgatcatgttctctgccctgtctgtccggatcgccatcaactacctgaataaaatactggatgccgccacagcaacgtctgctgaaagcaatatggtgaccctggcggcgcaatgtttgctggccgggattgccgcaggcgtcgtggtgtatttttcagcgaaaatagccactgcgctgagcggtgccgccgtacaggccgtgttacagggtgcagccatgagcggactcactgggctggcgagcaaatctgccgacgtcgccagacccggcataaaggccgggggcagactgaccaccaaaggtggcatggcggcagcagcgacaaccggcaggttcattgccgcaggtgcgggcaaagccgcgaatgcctggcagaaacgtgccaccgccattgaaagcatgaaacgccagaatcagcagcgtcaccgttaatcctcccgaccgctaatttcttttctccgtcacgccgtggcctctgccagcggtgcggctttcctgcatttatccgataagaggcatccatgaaattcagcatcttgcttctggtgctgtacgcgctttccggctgcacgcagcatcacggcgacctcccgcctgtgtccggcgatccccagccggttaattcccccgccataatccaggagctgactcaccatgtctgatattcagcacatcatcaatgtctcgcgctcttttgaatccatcctgctggaaaaggaagagcgttcccgcaaaaccgcctggcgggtggccgctgccgggcttattctggctgcactggcaattacggccatgattattctgctgccgctgaaaaccactgacattgaattatggtcggtggacaaacagaccggtcgttatgagtatatgacccgcattaaagagcgggatattgcgtctgaaaaagcactggcccattcactggcggcacactatgtccgactccgcgaagggtataattatttctccctccagcgtgattacaacgacgtacagttatttaacagcgacagcgtgaaccgggattatctggacgggtttaacggcgaccaggctccggacgttatttttaataaagccgaatatgtcgtctatatcgacattatttctaatgtgcatgcgcctgccaccggaccagataacctggccacactgcgtatcaagcgcaccctccgccgtatttctgataattcagtgaaaacggatttctggaatgtccgcctcacttaccgctatgtcccgcatcagcaactgacggacagtcagcgggaagtgaatccgctgggctttatcgtcaccagctaccagcgcgataaagaactgaggagcgaatgatgctgaaaaacatcctgctcctgacgggcttactcgcgtcatacgcggcatggagtgccgccaccccgcgcggtagcggctatgacagccggatgcagaacgtatcgtataacagtcagaacgccacggtcgtcaatacccgccctggctacgtcaccacgctgctgtttgacgacgatgaagctgtgattgatgcgcaagcgggctttcccaaaggctggacggtaacgaaaagtgataaccgggtgggcgtcagcccgaaccccatcacccagccggtgacggacgccagcggcaacaacatcagccaggtgttcctgcccacggcgaaggactggaagaccaacctcttcgtggtgacctcaaagcgtgattacagcctggagctgaacgtgctggaccacgattcccccgcgcaggcgttcgttatccgttaccactatccggccgaggttcgccagcaatccgccgccgccagcgccgcaagtcagacgcagcagcgtgaaagacaggagaagcagcagatagcagcggcattcggacaggccagcacgccgcgcaactggcgctacaccaaacgggtcgccgccggttcggcctccatcgcaccggattttgcctgggacgatggtcgttttgcctatatcggtttttcccccatcagaaccctgccttccgttttccgggtggttaacggacgggagcaggcgttcacgccccggacagttaagcagggtaattacaccgtgatggtggtgccggcagcgccgcaactggtgttgcgttacggcacctcggtggtggggatcgaaaacgacggattcgggcgcatcccgataacccgcagcgacaccgtttcaccgtccgttacgctggaggccagatgaccgataaacctgtcccggacgagccggaaaaaaccaccgcagagcgggaagcggaagcccgcgaacgcgcccgtgcggcaatggcgtatcaggagccagagcagaaaacaccgcccggccagccggaagtgacccgttttcgtaaggcatccggtcgccgcacgctgatcgtcagcctgctgagtctggcgctggtgatcgccctggcatccggcggcgatcgtcttttcagtgcattgaaagggggtaatgagaaagaagcagacaccgcgccgccgccctctgccgggaagacgctgcatgagcgtcaaaatctgggcatggacagtaacccgtttggcctgttcgggtcgcacacacaggaccgaacagtccctgcccgtcagaccgtcactcccgcaccgaccctgccaccgaccccacccgccctgaacaaggcagccgcgctggctaacgggccgaacaacacccgaacaatgccagccgataatgtacgcacgtccccggatgaaccgcgcagcaacgcagaaacgtccgacaatcggtcatcatccacgacgtacacatcctgtccgtcagtactgacctggggaaaggatggccgcctgcgctgcccggagactgccgcgccggaaacgggtaacaacgacaatccgggcatcgcccgtgtcaccggcgtcagacgactgggtcttgatcctgatctctatatcccggtggaccgctatatcccgtgttcgatgatgtggcgcttcgtgtccaatgtcggggggcatatttcctgcctggtcagtgaagatgtttacagcgccagcaaccatgtgacgctgatcccggcgggaacggtcgcccgtggcatctaccgcactggggcgctgcaacacggacgcagccggatgtttgtgctatggacggaactgcgtacgcctgagcccggcagcctgcaaatcccgctaagcaatacgcaggccagcggcccgctcggcgaggcggggatctcaggctggatcgacaatcacttctgggaacgtttcggcaatgccctgatgctcagtaccgtccaggacgtggcagcggcggcgtcggatgctgccccggggaaagaccgcaataccgactacaccgaaaacacccgcgctgccacggcggaaatggcgaaaacgacactggacaacagcatcaatatcccgcccaccctgtacctgaatcagggtgatgtcatcggcatcatgacaggcaccgatattgatttctcatccgtctggcagctgcgactgaaaaagaggtggtatgaacgctgaaaacttgtcgctggattttatgaaaaaccagctgtttggtgattttattgcgcaggacggcctgacggaaattgccgttaaccggccgggtgaactgcataccaaaatacgggggaaatggcgaacacatgaagccccgattacgctgcgccagtgttacgcctttgccagagcgctggcgtcctggcaggacgataatatcgacgacacctcgccgatcctttccgccacgcttgaatcaggcgagcgcattcaggccattattcccccggcctgtgagcgtaataccgtgtctattacgctgcgcaaaccctcattcgggcagaaaacgcatcagtcatggattgatgcgggattttataaccgggtgaccggtaaggagcggacggaaggcaaagatgttgaactgacgcgctactatcagagtgaggatattccccgctttatggaaaaagcggtggaatacggcaagacgatttttatcgtcggtgaaaccggatccggtaaaaccacctatatgaaaacgctgctgcactatattccccggcacctcaggctgaccaccatcgaggataatcccgaaatccggttctatcaccacaccaactatgtccatctcttttatccggcagacgccggggataatgccattgtcacgcccggcagactgatacgtgccaattatcgtatgaaccctgaccgaatattactggctgaaattcgcggacaagaagcctgggatgcgttgaaaatcgtcggttcagggcatgagggattgatgacctccctgcatgcgggcagcccgaaagaatgtattgaagggttaattgaccgctgttatgaaaatcccgactgccggaacattcctttcgacgttctgttacgcaaggtgctaaaaagcattgatgtgatagtcagcattgatattcacggtgacatacgccggatgagtgatgtttattttaaaccccttcatctcaatggcatgagaggtctattcaccaaaggactccaataaataacacatcaagatacgtaaccgtcgtttaaatatgaaggtgaccgaaatgaaaaaagtaataccctccgcattattattctgcattatggcgtcatattcaacctccggcatggccgctgacgcctgtgaagtggtgttatgcatgtacggtaaagccaccgggaacggcggcgacaacgaatgccattctgctgaacgcacattctttaatatcgtcaaaaagaacaagcacggttttctgccagaccatactgccgatgccagaaaatcatttttacttgagtgtgactcggcagacccggcaattatcagccagataatcagtaaatttggccgcatgcgtggttaattagcggaggttatctttatgaccaaaccgggttttattcagcatccctggacacatcagcgtggggattccatgcgcgcagcctgtgttattgagcacattgaaaatgaggcgatgcacggatgcggcctttattatgaaatttatcactaccgggttgtctgccggttattgcagttgctgcaaacgctgaacgccaccgacagaataacgctgacagaggaagctaaccggcgtggctttacgctggatgaaaccagcattaaagaaagtcgtcagttttattccgacatcatcagggaaatccacgagagccaatattaacccctgccttagttttattctcagctctcaaacgacagaggaatatttcagccgaatcaggcttaaggcgtggtggttttccggtttttacggcccggcacatttttcacgaattaaggagtgaagaaatgcaggccgtaaaaatgaggcagcagacagaattattttcgcggattaaggagcgaaaatagttcaggcgccgcgcctcaccggcaaacagccgcgcccacgcggattttgccggccggggggagccgaataaatttcgccgccccagcgagcgaaaagctgtcgcccacgacagcgctttatttggggggcgtcagccccgcacaccgtcgcagctaagtctccggccaaaagccggtagcgtggcgcgaccaccctctttaaaggtcagcttcccttttattcccgctgcgaggaacgagcaaagggaagaaaaaggcgaaagcgaccgtcttaaagagggtggtcgcgcgtagcgggcgacggtgtgccgcctttgcccctgggggttttgacgcggcgtccagccacgacattacccccatgcgacaggcaataagggcgtccagcccgcatgtactggcgcacaccgtttcgtgcagggaagcatgctttcctgcatatggccgcgcagcggccaccttctttgccccatacgctcgccccacgttttcgcccgacaccgtggggcgaactgatggggcgatgtcatggggcgaatcgctgacgaaggaggcatcatgattttaaataagcttgccgcttcactgtcgccgatagtgaacgggatgctggcactgctcgcttttgtgcaacagcaacaactgatgctggcgttattagcggggctgacgatgccgttttttgtatcaatgaaaagcgatgaacggcagaaagctccactctggaaaaagctgattattgctttttccctgctgtgttttctctccggtacactggctccgatagttatcggatcctttcagtggctgtataacatcagactcaccagtgataattcagcactggcgtggtcagtacggattgctttcactgtaaccgggattatttttcatattatgcttcgccgggtattaacgccggagctggacaggataaagaaacgccttgttaaaaagactacccttgaacgggaattacgtactgatgtccgcaccgtaaaatcccttttgccggaaacactgcattatgacccgctgcattatatcgacctgagtaaagggctatttatcggcatggacagggagaacgaaccaatgtatctcccgttaaaagactggcagaaacagcacgcggatattatcggcaccaccggagccggtaaaggggttgccaccgggatattgctttatcaaagtattttggccggtgaaggtgtgtttgttatggaccccaaggatgatgaatgggcaccccacctttaccgcaaagcctgcgaggatgcaggcaaaccttttgccctgattgacctgcgtaaaacccaataccagttaaacctcattgaagagatcaccgccgatgaactggaagagctttttgttgccggtttcagcctggcagagaaaggtcaggagtcggacttttatcgcattgatgaccgaaaagccgcccgtatggccgcacaatttgtcagtgataacacatctgcaacaatccgtgatgtttataacggtgactacgttcagagcatcgccgaaaaaatcaaagcctttttcggtaagattgaggaactggccttactcaatgccattaattcaccggagggtttttcactcaaaaaaatatttgatgaaggtggctgctgttatgttatcgggtccatgcgaaacagcaaaattattaccgcccagcgcatgctgctggttcgcctttaccagctggcagaaaggcgcgatcgagtaacagacgtcccccgccccattgctatttatctttccgaactgaaataccatttatccaggccagcgctggaaggtttaggcgcggcgcgggataaaggcgtacacattattatggaccaccagtccatcgccgatttaaaagactgcccggcagatttgaaaggtgacgccgttgtcggtgcggtcgttgaaaatgccaaattcaaactggtttaccgggttatggacccggatacagcggactgggtagcgagaatgtcaggcacgatcctggtggatgacgaactccgtaaggccaagacggataatatgctgacggaaaccatcgacagtgagcgcacaatccgccaggccgaacgtttctttattgacagcaatatgatcctgaacctccccgattttgtcagctttatctttacgacaaaaacgcaaccttctgcatcattaatttcaccgataaaggtcaaaaagcgccggttaaaaaccttttctgtttcccctgatattgccgcagcggcggcacctgtgaagatcgcactggattttggcgacgatgataaaccaaccgcgctggatgagatgacatcgcatccggctcttttcttcgacgaaaacgaagtcaaaccggcaaagccccaacctgatgaggaagaacacctgtccccgctggatttttaaggagcgcttatgctgatttcgacatataaagagcgccagacacgcaacagagaaaaaataaaacaactgctgaacttcctgaaagaagaaacctacagcgattttaaaacgctgatgctgctatttggtttccgggatcataagtcgctttattcgctgctggcaaaaacagagcgaatggggttaatacagaagcatgcgcttgaatcacgaacaatgaagatttcattatgggggatcaccagcgacgggctggccatggtgctaaccccgaatgataaaatctttcctgctcgatttgaaccatcaaaaatcaccggctggacgctggagcaccaccttgataatcaggccgccaggattattctggagaaaaaaggcgcttcgggatggattaacggcgaccgggccacctttgtcagccagtatcaggtaaaacatcgcccggacggattactgacgctgcccgacggtaacgttattgccattgaaaccgagcgcagactgaaaacccgagcccgctaccagtcgataattgccagccacttactggcccgtacctgcaagcagtggatttacgttttttatgttgtgcccgatctacataagaagcgtgcgcttgaactgctgtttgacagcatcaggcatgtcatcatcaaccatcagcacgtcccacttgaagaacgccaccgtcgggtgtttcgcatttatacctttgatgaactgaaacacctgtcattaggcagctatacgtaagcttttactcaggccatcgtgatggcctcatcggcctggcggcttaccgccaggcggacgatttttattccactgcgaggcgcagactgttcggtactcgctgtgctgcgttccgcctcagtcagcgccttgcagcgttgcccgttaaaactcatataaccgcattccattgcggttgcctaatcccggtctcagagtttatccatcaggtaacgatgtgctttagaggctgcgctggccgctttgaaaatatagcgcttgtcgtttttcagcgctttcagccaggaagcaatatagctttcatgttgtacctctccctcaattcccaaatccgccatcagaaaggcacttcccagttccgcgacaagttcttcctctgcataatccgcactgccaaacttccctttcattttacggttcagatgttttttgcccccactccagtgaaccagctcatgcaggcctgtagcgtagaagttagcagcatccgaaaacagatggcgctccggtagccagacttcatcagttgaagggctgaaaaaggcgttttgtcctttctcgatgatgtttgcgccactcttccgtaacaggttctcagcctgcggcaccgggccaaaggttgcttccggactgcccgtttcagttgtcagaggcaaaccgtcgatttgctgaacgttaaacacggtaaaggttttcagcatcgggatatgttcaacgtctccggcatcgttttccttttcgagggtcgtatagaaaatggctgtagtgccatgttcccccttgcgaacctgcccacttgcagcctgtgcctgtttgtaagtcatccagcgtgaatcgctaaaaccctgttttgatgcgctgcaccacaacagcataatattaatgccgctgtaagccgtgccagtggcgtaattagatggcagtccagacatgccggatacacgcttccacggacaggaccacggttttacaccggcttcaagtgctacaatgatgttctcagtaacggtctgataaatgtcggttctggttttagaaaatttcgtttttgaggagcctgactgctccagcggggatacgctggtcgccgctgcggtgttaggggcgcttgtccgggtggtatgcagggatatcgtcatggtttttctccgtcagtgtgtgattttcgtcttcgtatcgcctgacggttcgctttcccgacatcgttccggcacgcaaggacgcagcatgcgtgccatttatccttgcgggacgggttgtgttgggaaacgattaaccggaagccgatagaggaacgaaaagcgcacaggagaaaaaactgcccctgcatagccgggcctagcgccccttactccgcagtggtgaaaagtagatttgtggtgttgagtctgagaccggcactgacaggaacttcatgtaggtgttagcatgcttttctgccgggcgagacgatcctgctaaccgggggcggtttgttcttaaattgtctcgttccggcattcatcactaccgggtccgggcagtctcctcattgaacgcagcgtacagtctgtccaccaccgcccggatccggggtgagagatttcttgaaacaggccacagcgccgtaaccggggcatcatactcgggggtcgtaacaggtataatcctcagttgccctttagcgatttcgtctccggccagccatgttgacaggaaggcaatccccataccactgacagccgcatcccgcagagcttcaccgtggctgacaatgtggcgaatagtgggttcaatcagggttagacggccattttcatccagcactttccagggtaatactctgccatccctggaaaagcccaggcaggcatgtaaaagcagttcttctgcgctgccaggcaggccgtgacgactaatgtatgcaggagaagcgcaaatgacagaacgctgagtggcgatttttcgcccggaaagactggcagagtttcctgtatcaccgagccgtacagcaagatcgatattttcctcgataagatctacccggcgatcggtgaaagtgatatccagtctgagctccggatactcagtacacagcgttgcaaggacaggcatgacgcaaatcctgccatatgatacggggaggctgatgcgcagcgtacctgaaaccacctttttgcgggacgccagaagagattctgcttcatcaagctcatccaaaacgttgaggcagctccggtaatacagttctccctcttcggtcaggttgatgcttcgggtggtacggttcagcagtttaacaccgagccgttgttcaaggcgggcgacatgtttgccggtagccgattttgatacgcccatccggacggcggcggctgtaaagctgcctgtctccacggtatgcacaaaagcggccatgctgagtaactgagaatgcaggataaatgccattcaattgtctccatcagggaggaaatgtatttcctttatatcgcgatacacgccgtattgttgtcaataagatgatttttccgacttacaggagaaatcactatggctcaaatgatgaaacgctggcagttgtcgtctttcggcactgaaaacctccacctggcagaagtacctttgccggaaccaggacataacgagttgctggttaaagtctctgcggtctcccttaactacagagataaactggtgctggaggggaaactgctgcctgacctcccggaaatgcctttcacgcccgtttcggatatggcgggtgttattgtcgcaacggggccgggtgtgtcccgtttcactacaggaaaccgggtcactggaaatttctggacgcagtggctggatggcgatgcgccggaagatatggtccatcatggccgctcactgggcggtccgctgcccggaatgctggctgaatatgtcatactccacgaagatgtggctgtcgcctctcctgactcgctgagtgacgaggaggtttccactctgccggttgcggccctgacagcctggttcgcgctggtggaaacaggaaatctcagaaaggggcagcgggtgctggtccagggaaccggcggtgtggcactggcagggctccagctggcgcgggctctgggcgcggaagtgaccgttctctcccggagtgaagaaaagctacagcgtgcaaaggcgcttggggcatcaggtttaatcaacaccagtctgacaccggaatggtcattgcgggttgctgaactaaccgggggatgtggatttgaccatattctggagcttatcggcggggataatttgcgccagtctgcggatgcccttgcgccgggaggcaggattgctcagattggtttccttaaaggcaatgagatgattcttcctgccttccccctgatgcttaaaagagcagttattcaggggattaccgtgggccaccgtcgggctcttgaagatttatgtcagactgttgaccgccatcagattaaacccgtgattgataaaatatacaatttcgctgacgcgcaggcagccttcacacatctggaagaaggaccattcgggaaaatcgtcatccgaatcggttagcatttggggcgtaaacagaaaaagtctactatcacgtatggcatgcagggggacattgtcctcctcattttcttatggtctttttacacgttcgctttcaataagagacatactgatgagcacttacattactctgtcttcgattatcaccgctgctgaaaggattaaaaaatcggtcattcggacccccacggttttgtctccgggattgtcggatatgctgggaagaaaggtgtttctcaaactggagaatttgcagacgggtggctcttttaaagccaggggagtactgaacctgctttccgctttttccggtaatctgagagattaccgtttcgctgccgtcagtggcggtaactttggtatcgcagtggcagaagcggccaaagcgtttgatataaacgtgaccgtgattatgccagaaaacgccccggcctcatccattgaaaaaatacgccattccggcagcactgttattcttgaaaaagatgtcagctccgcgtttgaacaggcaaggacgcttgcagagcagggataccacataattgatgactgtatcgatacactggttgcggaaggatacggaacccttgcactcgaactgatggaagattgccctacactgaccgatttatttgttgcggtgggtggcggtgcaatgctggcaggcattgcgacggtactcaaatcccgtaacccagacatccggatatggggagtggaaacggagggagccagttcgatgtaccaggcattgagggcaggaaaccccgtcaacgtggatatcacttcttccatttcaacccttggcgtccctgtgattgaccgccttatgcttgaacacgcgcagcgctacattgaaaaggtcatcaccgtatcggatagcgacgccatacaaggcatgatttcattcggcgagcaagccaggcagtgggttgagccagcagccgggacgcttattcccgcagctgtcgctgtaatccccaacctccccaaagatgcgatcattgggctcatagtatgtgggggcaacgttacgcaacgagaaatgaatatatgggcaaattgttgaggtatttgttaagtagtctaagactattgcgcataatgttacccaactcaagggtattttgaaaaaattagatagcgataatgggaggtgaatccctcccaatacgttacgttaaagagtgttgggggtttttaagtccaaaagtaaggatacatcctgtttaaatttatcatgaaagtctttgggtaaaccggcagatgagtataaatatcctgacgctgctatcataaattgaacaatcctatttgatcttctcaataagatggatagctgaaaatctttatatccgtcactctcagacacatatcttaatgaaagctctcggcatggtattagtgcctcttttatgtctacaggtgcctctaacaagcttctggaaacatcaacaaatctttcccaacctggtaactcaagctcccctttttttcctccagaaacttcctgaactgcatttttaaggtctctgcgctgaatataactatcacggccgccccaaacataatagcgcaaaactttctcatactcagactgattcatttgaacatcaaaaacatcagctaattgagaagtaattggaatcataactaataaaaaacttagaacgatagagctgtaaaccgacatgtgttcatctttctcaggattcagctctcctttatttagcctaacaatacccaataactctctaagagattttgcaaaatcaacttcgagtggaatgcgagtattaacgtactctcctaaacttttaagatgatcatttttttcaaaaatcaaataataggaatgccaagatgaaatatgtgtggagtaatttttcctatccaaataatttatatttgcagattcagcatatttttcaaaatcactttcctgaaaaagatggacatttaatgtctttgcactaacacgatgcgcttcagttgctttctttgctaaaatgacatacgactcgttgcaaccaatatatgccattacaccagcggcccagaacgctctgttaattgcactcatcttaccaacggttttacaatcaaacagggttttttggattcccccccgcctagaaacctccaatcctaaaacgtcaagatcagtaattactgtacgaatgtctgaaatctctctgacgttattaacaacaacctcaagataaggaagaattccgttcgatatgcaataacgtatagctttctctttttgagatgtatctttatccaaagcagccataaataacccttaaatattcaaatttagtagcaactgatccatttcatgtttagcttcagccactatttgaacttgctttctttttctcatgtctgaagatgagataatagactgaatgtaagattcatctctagaaaaagatagtctcgcctcagcgttgacttccaaattagccaattctccagtagacagtagcttaattgctatatctaaagcattaaaattctcttcggtttttatcaatactaattcgcatctgtccccagatatgggtttgagatatgcaaccttcataaaaacgagatttttatattgatcgcttgcctcagaattactattaagatatcccttatcccgaagagcccgtaaaattgccaaaggatatcttattctatactgagcgggcataagttgtcctttccgtacacaagatactaaagccattgcacgttcatatatctctctattagccgagtttaagcgcatagccccaggatttggagtaaaaacaaattgctctaacaccccattaccaaatcgtatggacggaggttttaatataccttcagaagccattacctgtacaagagaaagttcaacgggatccatcttattccctccaatttcctggttattgacaaccattgaaagaggccatccttggttagcttttagtttattcaaaacgcggcttatattcgaagagccggatttcgctgttaaatcagctaatccatcaaggttatctgcaaaatagtacggactaaggataatatctttacctcttgctttgtgagttcgtagcaagcccccttcctcactatacctcatacacatatcgaatgtattactatcggcgcccagcgtatttataagcttctgtttattctcaggtttattataaacctcactcagaattgcgagcattacagattctgtctcgctcaggtcactttcctctgcataattaccaatcacatcataaacacttttaaaatgtggaatcttaggaattacagcagttgttttggaacgtgtacctataagctcaatgaactcaagatcatctagaatttttaaaacttgatccaaagccattgatggaattttaaaataatggtacgaaacctgctttaaaacatcgtatggtatagtgccaagccctctaatatgaaccgcgagagttgctgccattccaagtttctttagataatcaaattcaggtgtttcatactcacctaaagcgctatgtaaatcataggaaaactctgcaatttttgttatgttcattagcgacccattatataatccattgattttaaacatctatttttgaaggggtagtatagtattatgataacaaatttctatctttctcgagtagattaacatgtaacatacattattatagcatgttaataaatgttggaacacctgcatataagtttcagacaatggtgttgtcatcaagaagctcttttaatgctgatttgggaccctactgtaagaatatccattttatctccatgccgtttttgagatttccattttttaccctagccaaaaataagtacactgtaaaatcagaggtcttcatctagctattttatcagtagcataatatttcttttcaggtcacctgacagtcatttttcacggatacgtagtgtctcgtaaatgtaaagaatacgtgtactttgcccttgcacggagaggtctttatggaaacaaaattcacgaaaagaccgacagaaatccggcgggagtaaaaaatccaaatgccaatatgtagtccctcgctactcagcagtagtttttgtactggatcatttccattataattcctttgactacaaactacattacgacgtaaaattaaccttaagcttataattaaaaaattttcaaatgaaaaatcaaagctatcgaataattaatatctaaaaccaccattacagaaccattcactttcagaaagcgcggaataaatagccgtccctcatgaattaatgcaattaaatcttctactttcagcctccagagttagatattccacaacactttcagtaccaccattattataaagaatacaatctaattaaccatctcttcggatactattcccagtttttttattctttgagtactgggaagatttttaaaacgacatccaaacatcataatttttaatttccaatatttaacttcgcctctagcaacaacatttcactctctttatttttcaccattgctttcatcatttctttatcgatagtgacgtcgccatttttagatatgattagatgcctgtcatatttattaacaagtagatcagataagcctcggctaaacccatcatttattaatgaaattattcttttatctttagtgccatactttatcttgagataaaaggtttcctcaataagaccaacctcattaatcacctcaataaatttaaatatttgataatctaaaaaatcatcttcttctttaattctcactatagctagatttattttttcagcatttgtttttttattaatgttaacccagtgttcacgatatccattcccgaatgtttcatcaccccattttccaacaaatacgaattctttctgcgtatcttttggaatactattccaataacttaaaaagtttctaataattaatttgaaaggtgtgttttttaccttccaagttaaaaacatcgcgtaaaatttttgtgcatccaaatttttcaacctggttaagtcattgtattttccatcatcaattatcttgttaatgaataatgatgaaatcaaagatattaatgattcctcatcagatattaaatcctgattctgacggtaatgatcaatctcttcctgaataatatgttcacaatcatgtatatttagttcagatatattattttcgtataatattttcccaatttccgtttccacatatttacctttataatccggaactattccttgctcgagattttctaaatcatcaatagatctgttaaattcatctatattatattcatttattgtggtttcatttaataaaacattatttacctgatcaaatcttttgctatcaactttagaaacctttttaataaaatcagctaaattcgtttttttcccagtatattgttcagttccgattataaatatggctggcaatagttttttaatttggattggcttatcattattaaaaatatcaccaaatcggttgattctgcccgcaagattattgaattgggaatggtttaatgaggtccggccttttttattttctaaaataaataacctttctactggtaaattaacgccttcaagaagagttgagttagttacaagatatttaacatgccgagattttttaaatatcgtttcaatatatagccgcacattatctgtcattgatccgtgatgatacacaatcccctttttcagacattttataataaggtagttttcatcaatgttttctgataactccatacaagctttatctacaacagcacaggtaatatcctgaagggattgagaaagttctctagaaaaattttctaattttttggggctattaaagtatataatgtttttatctaacgacttatttttaatgagctcaatatgattatttgaagttttctttatgctgctccacttatctaagaattgatcatatcgttgaaaattttcatgttgagttctgtaatcataaagatagataatctcacttttaacatattcatttactttatagtctgcaattttttggtctatcttttttaatgcaagattattagcatcattcaaaaacggcgtgaaatatttaattttaagattttttttacgaaaaattgctcggcagattacattagctaataatttacttctatttgtattttccagaagattatgagcttcatctattaatagaagatcgaagtaaaaatctttattttttgataataacttagaagctcgctcctgagttaaaacaaaaatattatcctctccttttttgtacatctcaggatgagttattactttcacttttgtattatatgattttataatgttattttttgtttgtgagattaatgctttagacggtacgataacacatctatttccaccaagggttttctttatttcttcaataataatattagatttcccatacgatgtaggcgctacaatagcaacattattatctggactttcttgaaggaaaaagttcatatcactttgctgttgagtcaatgtgattccattctcaaaaaagttatcagcgaaactatcagataaagttttaatgaatgtatcgttatcagatgttaaataatcatcactaagatgtttagctacaggaattaggccttggtttatggcaatctcatataacggaatataatcctttgtcttattggcataaagcaaagctatcctataaccaaaccttcttatgtgaatatcctcctgatttacaaaaacaatcgtcaatgacagtaatgtttgtatctctctcatagttaattcttttctgagaaacaacttggaataatagttataaatttctgttttctttaattgaagtaaagttagaggctgaggtttttttttgttcactttttactttcctcaatcaagaaatcgacaaccttatttaaagtacttttttgaatagaaaaacaaaaaacatctgcaaattcagctttttcgaccatacttttttgaaaatccataacagttttttcgatagttttaaattttatgtcgtggaataaactagaaataaaaaatacataattatcagtgctagttgatttcttttcagatgttttttcaccttcaatggcaagaagatctagtactacatccttataatttctatgctgagaaatagcaatgctagccgcattcatcgcattagcccaatgattgatttcattttcatttaatctagtttttagatcgttatacgctgtactcaaaagaagttgagaagtctcattaacatccttcccttttcgtaactcaccagatttaacttcagtaatccagactttatgatctgatgttgaatataaaagcaaatcaaatcctttcttaatacttttttcttcaagattaaaaaaaggcgaagcggtttcgaaattatctaaaagctcattgataatgatatgtgaaagaaattcaccaatcattcccttttgagtttttgcaggttttttttcatacctctctaaaaaagcttcaactgttggtttataccgatacattgcatatccgctcctagagtgagtttctccatggcaaatccgtgtaagatgattcttaagtgcttgcttgagctcatcagaaaaattcgatatgtgacataaaccatagccacttttgagcaaaatttggacgccatctaacgttttcaagttctactactcttgagatgattaaattttgtctaataatatcacacaattttatgtgtcagaatgtgaataatctcatagacgtgatctttttttcctgactcagcaattgacgtcgaaatgctatgaaacgactaataatacattttaaatacaataaaatcctttcatatcatatagttaactaattttattatgttataacttgctctatcattgtatacactactttcgcaacctattgacgttctactcatacgctgtgattttgcaatgtaagcactcagttaagagctgcttttagttaggcttgtcatgaccaccgatttttctgaacggtcatgatgtatcggttacaataccagccgttttgactcgcagtgggcaagccaggcaacaaatcctctacgagcaaaaagcgaacaaaccgctttttgctaacgagtcatttgggccttagtcagcactatttttatagcagctacgaccgcacaagtaggcttcccagcgacacaattaggggatattgaatgcttataaccagatttatataatccacaactaatggtggtcattttggtggtcttgacaggatgaagattcaggtttagcttacttattagccagttgctggcaaaggcgatcccagtcagaggagccatatttgaaaagcctgcttttgaagcaggctttttgcttttctgcgtcctgcgttaacttaaaattgcatccagcctggcaagcacttcatttaccacagcgtctggtatgctttccagccgcttgccgttccgggcagccatatcaatggttctgggctggtcgcagcgaataacgcccgttgtttttgtccctgccccttccagtgaaacggtgaaacctgccgtgcgagcaaaatttccaccgctggtgatgggaacaacaacgggtaaccgggtcagcttgttaaacgatgccttcgatacgataagcaccggacgttttccgctttgctcgtggccagcaatcggatccagtgaaacgagccagatttcccctctgtccatctacaggatctccttgcccaccgcaggagcatcaatccattcccgatcctcttcgctcatttcggcgtgcggatcgcactgcgccagcagctcctcaagagaataatgaggccgtttctggggttcaataatcaggcagccattattaatggtcatgccgacttcgctgtccgtcgacagctccagcgttttgagcacggcgggaggaaccgccaacatgatggatccgccgacctttttcaggcgagtggtatacatagagcacctccgaatattatattttaatataacatctacggcaggcggtgcacaattattcatcagattcatggtgatttccttttcgtaataaagcgtgaagaaagccgttatccatcggaggacagtacaggtgggaacgaaacgcgtaattaagaaggctgataatagaaaactgtttttgcggtttaaaggattatggcggttcaggtaaacggaatgcgaggcggcttccggatcggagctgcttcggaggagcatcagcggcagcgtgaaggccagatttttccaggttcgaagtcgaacgcttcagcaatcaatctttagctgttgggccagcggcgggtaagcgtactagccagcatggagggcaccaggacctgcctgtcgcaaaagcgctgacagtaaagtgccccgtttttcagcccacctatgatgtcgacaggatgccggtcagactgcatcatactttgagatataccgcatcaataaacttcactcttcaggcagtacatcgccagcgcggggctttcatttttgttgtgagctcatcaaaaaacggctgaaaattgaggagactaaaacactattcatgatttttgaggcgaaagcttggggcgttccttttgtttctgcccgcaaccctgaagacagagccaaggacgaagatctcatcgttatggcaattcgtcatatactgaatgacaaagcgggagccgaccaaactgaggttcaaaaacgccaggcatatcgccgccattttcgtcagcgataccaaccccggcggctaacgggaggatcggggctacaacgggtttagcggtattttgcacccgtgcagccccggaaccgggcagcgttaacggcgcgggatggcgaccggacgataaagccgcagaagcgtcaggcgtatcgaccgtgcaaaatagcgtgataaaatcagtttttcatcccgtctattttcacccgccgtttcacatgctattgctccaggatatttttattcatcgacatcacccatgttataaatgttctcagggggaccgggatatgtttgcggctcggatagtaaatattaaaacgatcggcaggataacgataatcagacagtaagcggacaagcccgccttctttaattttatcctgaaccagattctcatacacaaaggcaatacccaacccggattccgcagcctgtatcatcgccgcatcggaatccatcaccagatcgcccttcacagccacttccgttataacgctcgtagcgctaataaactcccagcggtacagatccccacctggaaagcaacgattaatgcatctgaaattaacgagatcttttggtgaagagggtgcgccgcatttttttataaaatccgcactcgccactggaataagagatagcggttcgccaaagggtatggcaatcatatctttaggcacatcttgcgtatagcgtatacccgcatcaaatcctgaatctataatattaacttttctgtccgtggtgaataactcaagtttaatatccggatactcatttttgaacggtgcgaagtaacgttgaaagaagagatccagcacaatgcgtggcaaatttagtttcaccaccccttccggctttgctctgtgctcattaaggttatcaatcacccgcctgtagtcattgagcacaggagtaacgtcattcagaaactcctggccgatagcggtcagggaaagactgcgcgtagaacgatttaaaagcctcgcgcccagtttctcttccagattatttatggcaatagttaacgttggtggagaaatattcaactcttttgctgcctgacgaaaacttccatgcttcacaataagaataagcatttctacatgttgcaattcgggaatatttttcattgttaacatccgtaaaatactgcattagaaagagattaattgttgtgagtggaaaagggaagtatatatttcagcacattgtacgagtgaggaaaataaaatggaaacacgttatctgggaaagaacaaatttcaggtgtcggcattaggtctgggttgtatgggaatgagttttgcctatggcggagccgaagagtcgcaggcaattaacaccattcacgctgcggttgatttgggcgtcaccttccttgataccgcagaagtttatggcccatttgagaatgaagtgctgatcggaaaagcaatcaaaggcgttcgcgataaggtacagattgcgaccaaatttggtttccgcattcttcctggcggtcaggggcttgagcgtatggccggcgttgacagccgtcctgaacatatccgcgaagcggtagaaggctccctaaaacgtctcaacgtcgagactattgatctcctttatcagcaccgcgttgatcccaccgtccccgttgaagacgtagtgggaacaatggcagatctggtcaaggaagggaaaattctccatatcggactttccgaggtctctgccaatactttacgccgggcctgtgaagttcatccgatcgccgccgttcagaccgaatattctctctggacccgcgagccggaagaaaacattctcaaaacttgccgcgaattaggggtaggatttgtgccctatagcccgctgggtcgtggattcttaaccggcaaaatcaccgatcggtccggcttcgccgaggatgattttcggcgcaatcttcctcgcttccagcacgatgccatgcggaaaaaccagcagctactcagccagctgcgggatgtggccgataaatatcgctgtaccctggcccagctcgctctcgcgtgggtgatgagtaaaggcgatgatattgtccccattcccggcgcgcgccaaatcgcacatttgcaggataatgccggcgcagccagcctggctatttccgatgttgatattaaactcatcgatcgcatctttacccctgacaatattcacggattaagatatacccagggtgattttcatttaatcgataagtaacatcctgctataaattctcccgcctttccggcgggagctaaggtttaccgtctcgcgcacatttctcctccaccgcgccagtttgctggcgccatgcggtaacctcctcatcaagccaggccttaaatagaacggcttcgtttttctgctctgcgccctgcgatgaaaccagccagtaaggccacggataaggggcggtgaaagacgtaagctgtaccagttcacccctggagagcgcatcctggactaaagagcggcgttccagcgcgatacctttaccgagccggactgcctccagcactaggtttgagtcgttgatgcacaaaccgcctggcacaatctctctttcaagccccgcgttgatacaccatgctttccacgactccatggaaaagataatgttgctcttcgctatctctgacggcgtacgggggagcacgccgccgttataggttggcgcggccacaacgataagctgatcggagaaaaggtaatggctctccgttccttcccagtcgccttttcccatgcgtatagccaaatccgccccttcctgctgcatgctggttatcgccaggctcgcctgtattcgcagcgagatatgggggtatttctcccgaaatcgttccaggcgaggcaacaaccagtggcagccgaacgagggcaccatcgccagggtcagatcctgccggcgggggttgacctgcaccagccgggtggcatcagcaatatggtgcaaagcctcgcggacctgtaaggcatagagccgcccttcttcattaatctgcacgccgcggccgtgacggataaacagcttgaggccgaccatctcctccagcactttaatctgctggctgatggctgaatgcgtaacgtgtagctctttcgccgccagcgtcacgctgccaagacgcgccacggcttcaaaactacgtaaactcgcaatagggggaaaatccgccatgttaccgctcccacaacctgacgcgtaaaacgtgacccacaatctgtcagtaatactaacccaacccgtaagatactgaagatattcgccatgacgaatttattgtactgtttcttcaccgccggcaatgaagcattaacctcagcctatttcaccagcacaggaaaacaggaatcatgatgaagcttattggcatgatggattcgccttatgtaaggcgcgtggcgatttcccttgaactctacggcgtcgagtttgcaagtcacccgctgtccgtattcagcagctttgaagccttttccaggataaatcctgcggtcaaagcgccgacgctggtgctggataacggaattcgcctgatggattcgtcgctgatactctcttattttgaagcccaggccgccccggggcgcaagctgctgccggtctcgccggacgcgctggcaagggatctgcaaacgctgggctttattctcgccgcgggtgaaaaggcggtacaaaatgtctatgaacacaatctgcgcccggcggaaaagcagcataatccgtggatagcgcgcatcacgactcagctgctggcagcctgcagggagtggaacaggctgctggaggagcgtccggcggccgcggttcccgatcaggtggccgtaacgagtacggttatctggacctttattcagtcaacgatccctcacgtggttcatgcgggagactttaatcatatccggtccgttgccgaattatttgaaacccatagcgcctttaaaaaacatccctttagctaaagcatcagctcaatgcgatgaagctaaaccctgaacgtgaatcgccacggcaaccgagagcgcccggcaaccgcgggcgcgttatcctgatggaagaaatcgcctggcgtgagggaaagggttaaaaaccgctaccggcgtgcagtgctgcacgaccaatctccaccggcatccctgaacggcgttcaagcgcctgctccgcgtgattcacatccaccccctcgcccttcacaaaggcctgaatcgccggcgtgatggggagcggcaccttccggtccgattcatactccgcgcggttacgcgacaacggttcgtgaacctcaacccagcggctgccgtccggctcggcggtatacttcaccggctggtcgatgatttgcacgcgcgtcccgaccggaacggtatcaaacaggtatttgatgtcgtcgttacgcaggcggatgcagccctggctcacgcgcaggccaatgccgaaattggcgttggtgccgtggatcgcgtagagcctgccgatgtaaatcgcgtacaggcccatgggattatccggccctgcgggcacaaacgcgggcaggctttcgccacggctggcgtattcacgacgggtattggcggtgggcgtccaggtcggcgcctcctgcttacgctccacggcggtgacccagttacggggggtttcgcgtcctgcctggccaatgccaatcggcagaacgtcaaccgttgtgccatcgggcggatagtagtagagacgcatttcggccacgttgatcacgatcccgttgcgaaccgtagcgggcaggataagctgctgcgggaccaccagcgtggagcccgacttcggcagatacacgtcgacgccggggttggcctcgagcatattgctcaggccctgaccgtactgagcggcaaaggcctccagcggctgggtattgtgttgcggaatggtgatggtcagcgggctgcccaccaggcggcttccttccggcggcaacgggtagctcaccgccagagcgctctggctggtgaggatcataataagagaacaaagcagtttcacacgccgcacaatttcccttcctttgtggcgataatcgtgaatgaattatagcttcgtttactctttcatatctgatttatcatcctgctaaatctgataatcgattgcggcctcttccggctccatcgcctgacgtttaatttcctccagcgacagccctgcgttacacagttcaataaagcgccagacgtaatttcgctgcagctgaccgcgcttcaggcccagccagacggtattggcatcgaacagatggcgggtatcgagacgcgtaaaggtatcagattcccgcgcgtcgcctgactgttccgccaccagccccacgcccagccccagctcgacgtaggttttgataacgtcggagtcctgagcgcttaatacgatatccggcatcagccctttacggttaaaggcttcgtcaatacgtgaacgcccggtaatcccctggcgataggtaatgagcggccagcgggcgatggcatcgagggttaacggcgtcacctgggtcagcggatgatctttggggaccagcaggctgtggtgccagcggaaccaggggaaagccaccagcgtcgggtcgttgctcaagcgctcgctggcgatgccgatatccgcgccgccgttgtgcagcagcgcttcaatttcctgcggcgtcccctgaactaattcaagacgtacgtcggaaaagagttcgcggaaggctttaatcaccggcggcaggctatagcgcgcctgggtgtgggtggtggcgatggttaagacgccggacgcatcgttggtaaacaggtccgcaaggcgacgaacgttgctggcttcattcagaatacgctcggcaatcgacagcaacgctttgcccggctccgtcatccccagcaggcgtttgccgcggcggataaaaatctcgatccccagctcttcttccagttcacgaatatgacggctgacgcccgattgcgatgtatagagcatattggcgacttccgtcaggttgtaatcctgacgggccgcttcacgaataattttgagttgctggaagttcaccctttcctccgggctatcagacataacatatgcactattgttaaagtctgttgtccctgctaacaaataataaaaaccagcaacttattccattcaggaatatagcctaactgactaacaatagttcacggttttccagcgacggacggctcaccagcgacattaaaatttccttaaccgcctgcgcctgcggcgacagactgccgcgtgccgacatattgaccgacagcgacaggctcattgacggcgtgctgatgcgcgccatccagccattcgccgcgctgcacagcgaacgggcggcggactcaggcagaacggtgacgcccatgccgctggcaatagccgccgtcagggtggtaatggattcaatttcgccgataatttttgccgacagtcgacgcagagtgaaggcttcggtgacccttgcgcgaacggcgctgtaatcacgcggcaggaacagattcatttccgcaaccgccgtcaaatccacgctctgccccgggcaatcccgggttccgaccaggtagagatcttccttcagcagcggctgactgacgatcccggcgaccggggaacgttcatagagcacggccatatccagctgaccgtcgataagcttatcgttgaggatcgttccgctgctttcctgcagatagaccataacttccggaagctcgttacgcaccgtttgcagcagcggcatggtaatggccgaagccgccgtgcccggggccagcccaattgacacctggccgcttagcgtctgaccgacgttgttaaccgccagctgcgcctgctcgcactggcgcaggatagtccgggcgtgggtgtaaaggatcttgcccgcttcggtcggcgtcacgccgcgcttggtgcggatcaacagctgctggtccagctcgccttccagggtcgcaacctgctggctcagcgccggttgtgcgatgtgcaagacttcagcggcctgggtcagactgccgatatcgacgattttcacaaaatacttcagtcgtcttaagttcattttgcctcctgtaaggaacaccagtaccaacactggccgtttagatgcagaaggttttgcaatttgcttgccagcttttttgcagggacgcaaatgccgctgcaggccgcgtaataagggatactgatagcaaaccgcgattttgttgcccggtaagcggattgcggtatgccccattaggggtataaatgcaccgcaacggtgcatccggcggcgcaatgccgtaaaaacaggcactctgctgaaattgtcagcaaacgaacaagttaaggtgattcaggctttgacaagggggatggtcatcgttaatatgcgccccgttcacacgattcctctgtagttcagtcggtagaacggcggactgttaatccgtatgtcactggttcgagtccagtcagaggagccaaatttaagaagcctgctttcgagcgggctttttgctttcttactctctcatttcagccagatcgtcttctttagtaacccccctcacgcgttctacaaccgcctcactcctctggctgtaacagaggaaaaaccccaaaacttattaatatcaattatttacgcaaataaacgacggtgagtacaggctgcggacgatccagccatttttcatcttttgtatcttaatatagcgtcccgagtccggatcgggactaaaaaagactttttgcatcattccctcgatcatattgtcggctttccgcttcgagatggtcgtttgggttaagtggtaaatgttattagctttctttgcatagatgaaatgatacgatctttcgacattgtacttgacgttatcgacgatcacttttccggaaacgtcaaaatagccgctgttatttccccgcatcagcaagaaagttttaaagtttgcatcaaagccaaatgagcccgattcaattcgcaaatttgcggaacaatcaaaatcgttttgctgatgaaaatgatttatcagccagccgcaaacaaaaacagcaaataaaattgacaacagaacataaacgctctttaccttaacgttattcaggaatttcataatcaggcctatagtagttctcacatgaatacagcgcacctggttttatttttgagtagatacagtgggccaaaaaaacccttccctcattggcttttaatacagattccgaaatattaaagtaaaaaacgctgttgcctaagcacaccattttctgctttgcgatcagctggcggaccagaaccatcatcttttgctgttgctcattcggtatggcgttaaaagttctgaccgggcaagaatcaatgcttcccagataatagccttcatcctggctggccgcaaaaatcaggcgatatcggtcggcactcacgctccagaaaaggataaccaacacaaatagcgcaagcagcgcatagccagacttttttgcccatcccgcagaaaatttacgtgttcccttatgtgcacagccgctgctgcttaacgcaatagcttccgcatcgttttcattacgtatggcgggggctgaattatccaccctctcaatcagtatgctcgcggacaccataaacccaacccggggcacggtaacgataatctcctcgacacagcccatattcctgaagatggctctcaggtcagaaatatatttattgaggctatggctagaggtccgcagcccatgcgcatcccagactttttcaagtatctcgttcctgtaaaccacatgctccctatggtctaaaaggaacttaagcaggcggcttgtggtggctgtcagcgtgacgcatgagtcttcatcgagccatatcagcccgtcatcgctcctgaaatggatcgttccttgaattttgtagatcataaacctgccttacaaataatcctcagtcgcatacaatccgcacatcaggcacatgcgcagtatttcatactgataataaccttaactttattgtaaattgaattttaaaacctaaaaaccaataaaagagaatacatataactaaaaaaaacacaatgctattattgccttcatcgaaacacacggcgtaaccaggcccatctgagctaaccttgcgcctgaaacaatatagaccaccagaacatcattcgggatgtatgagctgaacgcgtcctgaagctgtgagaaccgaggagataaatgatgattaaataataccatcacgcaatcaactacctgatacatgaaatggccagggatgatattttcaccgcctgaattagcgtcctgaaggcagcgtaaaagcgagaatccggacatctctataatggatatgcacaggcagataaaaagaaatctgattggctaaagataaagatgtcagacatttatcaaggaatgttccctaagaaaattccaatacaaagagtgtgcctattgttcaggggttaacgataactcaaccctatcatttttaatttacaaaaacctataaaaaaacaaattataaacctttaacgccatttataatgaaaatcacaaacaaaacacccacaaaattataactttgcagtggttacatcttttagagcctcagccgcatgcttcattgagacgggtgatgttagattactctcaattcgctgaatggttttattaacgatgagttaaaggtcaacccaaggatgagatcgcgttcagatatgaatctatcaactaatattttatctaaggataaatattttactctgggcctgattgaactgcttggagaagaatttattgacaatttctttttgattatagatttggactctaacgacctttcgggttcggagtggatttatttttcaaataaaaacattgttgccttcgcctccagcgacttagctttttataagtccgagctatttgaaaaaataaccgtactggacaaaaaaagtaataccagaagcatcctgaatttctttttaaagaaagaaacctcaggaaattatcatacaaagtaccggctaagcctgcgtgaaaagcagatgttaagcatgttaagcagaggggaaagcaaccaggagatcgcagaagagtttggcgtgaaacttaagactatttatacgcaccgccgcaacctgatgaataaattaggttgtaaaaacaggattacgtttcaaaagttatttttcaacaataaatgtttttttaagtgaagcatagcttcaggattattcataaacaggagttttatcatgaacaaattagcacttatcgttatttcagcactgtccctgagttctgctgcggctctggccgataccgttacggtgaacggcggtacggtgcattttaaaggggaagtggttaacgcggcctgcgcggttgatgccggttctatcgaccagaccgttcagttaggccaggttcgttctgcaaagctggcgaccgcaggcaacaccagcacggctgtcggcttcaatatccagctgaatgattgtgataccaccgtcgccaccaaagcctccgtcgcgtttaccggcacggcgattgacagcgccaacccaacggtactggccctgcagaactccgccgcgggcggcgcgactaacgtcggcgtacagatccttgaccgtaccggtaccccgctggcgctggatggtgccgccttcggcgcgcaaaccacgctgaacgatggcaccaacgttatcccgttccaggctcgctactacgcgactgccgcagccactgccggtaccgctaacgctgacgccacctttaaagtgcagtacgagtaattttttcatcaggcagggaagcgcgtcgggccaggacggcccgttatccgaataagagtaagggtgataatgatgcaaagaatgaagtctggtctgttgattttattgctcccaccgctggcgctggcaggaaaccagtgggacaccatgctgcccggcgggaacatgcgctttcaggggatagtcattgccgagtcctgccgcgttgaagcgggcgaccggcagatgacggtcaagatggggcaaatcagcagcaatcggtttcattcggccggggaggacaccaaccccgtccccttcgatattcacctgcaggagtgcagtaccgccgtgagccagcgcgttggcgtggcgtttcacggcgtcgccgatggtaaaaatccggacgtcctctcggttggcgagggtccggggatcgcgaccggcattggcgttgccctgtttgataaaaccggcagtcagatcccgctcaatgcgcccgcaggggcatggacgcagctgcacacggggccaacgacgctgcattttgtcgccaaatatcgttccaccgggaatcaggtcaccggaggagcggcaaatgctcaggcctggttctccctgacctaccagtaatcagcgccggtaacaggaattcaccgtgagaaagaaagagataagcatgaaaaatagacgggctaccacgcgcgggatgcgcggtttactggcaggactcctgctgctctccaccgccggttttaccgctcaggcgcaggccggcgtggcgctgggcgcgacccgcgtgatttatccggccggacagaaacaggctcagctggcggtgaccaataacgacgacagcacctatctgatccagtcatgggtagagaacgccgatggcgcgaaagacgggagctttgtcattaccccgccgctgttcgccatgcaggggaagaaagagaatactctgcgcatcctcgatgccaccaatggccggctgccgcaggaccgggaaacgctgttctggatgaacgtcaaagcaattccatcgatggataaatcaaagctcagcgaaaacacgctacagctggcgattatcagccgtatcaagctttattaccgcccggccaaactggcgctaccgccggatcaggccgcggaaaagctgaagttccgccgcagcggaagctcactcacgctgattaacccaaccccttattaccagacggtcaccgagctcaacgccggaacccgggtgctgaaaaatgcgctggtcccgccgatgggcgaagccagcgtcagtttaccgtccgatgcaggtcgcgagattacataccggacgattaacgactacggcgcactcaccccgcgtatgaaaggcgtcatgcagtaactgaccggggagcagcgctctccccctgaacgaaaaaaataacgatggccgggcgactttggaccggagggactatgtcacatctgaaatatggactcgaccacttgggctcccggcgaatgactccaggatctgctcgcgtattcgcgcagatcccccttgcccttttactttcctcaccggctttttacgcgcaggcggagctctatttcaacccacgctttctggcggacgatcccgccgccgtggcggatctgtccggttttgaaaagggccaggagctgccgccgggtacctatcgcgcggatatctacctgaatgacgggtatatgaccacccgcgatatcacctttaatgccgctgaaaagggccacgggctggccccctgcctgacccgcggacagctggccagcatgggcgtgaataccgcggccattgccggaatcgacgtgctggcggcggatgcctgcgtaccgctaaccgagatgatcaaagacgccaccacccgctttgatgccgggcagcagcggctgtatctgaccgtgccccaggcgtttatgggcaaccgcgcccgcggctatattccgcctgagctctgggaccacggaattaacgccgggctactgaactacaacttcaccggcaacaacgtgcacaacgacgtcggcggcagcagcaactacgcgtacctgaacctgcagagcgggctgaacctcggcgcctggcgcctgcgcgacaacaccacctggagctacagcagcagcggcagttcgacgaccaatgaaaacaaatggcagcatatcaactcgtggcttgagcgtgatattacgctactgcgttcgcgcctcacgctgggcgacagctacaccaacggcgacgtctttgacggcattaacttccgcggcgcgcagctagcttccgacgacaatatgctgccggacagccagaagggtttcgccccggtcattcacgggattgcccgcggcacggctcaggtatcggtcaaacagaacggctatgagatctaccagagcacggtgccgcccggcccgtttaccatcaacgatctctacgccgcgggcaacggcggcgacctgcaggtgaccatcaaagaggccgacggcagcagccaggtgttcaccgtcccctactcgtccgttccggtgctccagcgcgagggccatacccgctatgccgttaccgccggtgagtaccgcagcggcagcaatcagcaggaaaaaccgaagttcttccagggcaccctgctgcacggccttccggcgggctggacgctgtatggcggcacccagctggcggaccgctaccgcgcctttaacctcggcgtggggaaaaacatgggtgacctgggcgcgctgtcgctggatatcacccaggctaacgccaccctgcccgatgacagcgagcatcaggggcagtcggtgcgcttcctctataacaagtcgctgacggataccggcaccaatattcagctggtgggctaccgctactcgacgcgcggctacttcagcttcgccgataccacctacagccggatgagcggctacaacgtcgagacccaggacggggtgattgaagtgaagccaaaattcaccgactactacaacctcgcttacaacaagcgcggcaaagtgcagcttagcgtcacccagcagctggggcgcaccgccacgctctatctgagcggcagccaccagacctactggggcaccggcaaggccgatcagcagctccaggcaggactcaacgccgccatcgacgatatcaactggacgctcagctacagcctgaccaaaaacgcctggcagcaggggcgcgatcagatgctggcggtcaacgtcaatattccgttcagccactggctgcgttccgacagcaagtcggcctggcggcacgccagcgccagctacagcatgtccaacgatctgaacggcagaaccaccagcctcgccgggctgtacggcacgctgctggaggacaacaacctgagctacagcatgcagaccggctacgccggcggcggtgagggcaacagcggcggcaccggctacgcggcgctgaactaccgcggcggctacggcaacgccaacgttggctacagccgcagcgacggcatcaaacagctgtactacggcctgagcggcggcgtgctggctcacgccgacggcgtcaccctgagccagccgatgaacgacacggtggtgctgatcaaagcccccggcgcagacaacgtcaaagtggaaaaccagaccggggttcagaccgactggcgcggctacgccgtgctgccctacgccaccgaataccgggaaaaccgggtggcgctggacaccaacagcctggccgataacgtcgacctggacgatgcggtggccagcgtggtgccgacccacggcgcgattgtccgcgcggagtttaaggtccacgtcgggctcaagctgctgatgtctctcatctacaacggtaagccggttcccttcggcgcgctggtgacttctgacggcagccaggccagcagcatcgtcgccgataacggccaggtctacctgagcgggatgcccctggcgggcaaagtgcgggcgaaatggggcgaaggtccgaacgccagctgcgaggctgactacagcctgccgccggaaaaacagaaccagatgctgatcccgctgtccgccgagtgccgctaaggagaccatgatgagaaaaaccctgtatctgctgagcgccctcgtatcgctggcggtcaacaatgccagcgcggcggacagcaccatcaccatcagcggctacgttcgggataacgcctgcgccgtggcgggtgagtcgaaagattttaccgtcgacctgatggataacgccgcgaagcagttccatgcggttggggcgaccacgccgctggtgccgtttcgtatcgtgctgtcgccctgcggcagctcggttaccgcggtgaaggtcggctttgttggcgttgccgacagcatcaataccgacctgctacagctcgacggcggcgcctcagcggcggcggggatgggcgtgcagatccttgacgcgcagcagacggcgctgccgctcaatgccgcatcgtcagcgatcccctggaccacgctgacccccggccagaccaacacgctgaacttttacgcccggctgatggccacccgggtaccggtgaccgccggacacgttaatgcaaccgcaacattcacgcttgaatttcagtaaccggaggcgctgatgaacccgacctattccggatggctgctggccgcgatgctggcggcgtcctccccgacgctacaggccgccgacgtcaccattaccgttaacggtaaagtggtggccaaaccctgtaccgtttccaccgttaacgccaccgtcgatctcggcgatctctatacctttagcctggtctccgccggcgccgcttcgcccttgcacagcgtggcgctcaccctgagcaactgcccggtcggcacgtcgcgggtcaccgccagcttcagcggtacggcggacgccaccggctattacaagaaccagggtaccgccggcaacatccagcttgagctgcaggatgagggcggcaccacgctgaacaccggcgcgagaaaagaggtacaggtcgacgacgccacccagtccgccagcttcccgctacaggtcagagcgctgacggtcaacggcggtgcgacgcaaggaactattcaggcggtgattaacgtcacctatacctacgcctgagccaggagaacagagtaatgaaaaagataatcaccctgctgttaacgctgctgctggcgggctggtcgcttaacgcctggtcgttcgcctgtaaaaccgccgccggggtgacaatccccatcggcggcggatcggcgaacgtttacgtgaacctcgcgccggcggtcagcgtcgggcagaacctggtggtggatctctcgacgcagattttctgtcataacgactttccggattccatgatcgactacgtaacgctgcagcgcggctcggcctacggcggggtgctgtcgagcttttccggcaccgtcaggtataacggcatcagctacccgtttccaaccaccagcgaaacggcgcgtatgacctatagctccattgttgatagcccctggcctaccgtcctctatctgacgcccgtcagtagcgcaggcggcgtcgccatttccgccgggtcgttgatcgcggtcctgatcctgcgtcagaccaacaataaggataacgacgacttccagttcgtgtggaacatttacgccaacaataacgtcgtggtgccaaccggcggctgcgacgtttctgctcgcgatgtgacggtgacgctgccggaatatcccgcatccgccgccattccgctgacggtttactgcgcgcaaaaccagaatctcggctattacctctccggcaccacggagaacgcgggcaactcgatatttaccaataccgcctcagcgtcccctgcccagggggtgggcgttcagctgacgcgtaacggtagcgtcgtacccgccaacagtacggtgtcgttaggcaacgtaggcacctcggcggtcagcctcggattaaccgccaactacgcgcgcaccagcgggcaggtgaccgcgggtaacgtgcagtcgattatcggagtgacttttgtttacgaataatctcccgccccccggcggcgggcagccgctcgtcgctatcctgtcgccctgttcgctggctgccgaggggctgagggggataatagcgaagggaggagcccggcccgttgtgctgcccacggagacgccgcccctgcctgccggcgttcgccgcgtggtggtttttctcccggaaggccccgccgggctactggcaaccctgaagcgggccgccgcgctgctggcgcggtccaccacgccgctgcccatgctgttcctgagccgcagcccggcaagctggctgtggcccaccctggtgcatcaggtcgcagaccggcgtttgcttaccgccgtacgggccgccgcttccgatttgccggtcccctgcctggcggcgctgctgcgcgacgccgtgctcgaagaatacccctctcttgagcagctggcagaggatgaaacgcgagcgctcggcaagcgccccgccgggatcacccggccagagctggacgctatcctcggtttactctgcggctaccgcgccagcgctcaggctcaacgccgcggcatcagccacaagacgctctacaatcaaagaaccgcaggattaaaaaaaatggtggaacaccaccctgaaatggccgcccgctttcccggcagccagataagagaccagaaaagcgagagcatcgccgccctttccgctttcgagcgtgaacttgtgcatgcgatccacagccgccagatttttccggtatttcagcccattaccgatgaacaccatcaggtaaagggaatggagatcctctcccgctggaaccgaaacggcagcgtgctggctgccggcgattttttaccgcaaatacgctcggaatatgcctggctggtgctcaccgcgtttgtccttcaggaagcggtgcagaatattaatcagcattccggcgagtgttatttcgccgtgaatattcccgccgccgtcgccggcaacgagaacctgcttcgcatgatggaaaccgcgcgccagcagctgcgtcagccgcacaggtcgcagaggctggtgctggagtttgctgaaaataccgacctcaacggtcacggcaaaatcgccgaaaatatcgcccgcctgcaaaagcgcggcttccctatcatgcttgatgattgcttctcgcaaagcagcgtgatgtttccggtgcgcacgatgagattcagcgcttacaagctggatatgagcatcgtcaacgatatgcagcgcgatccgcacgcgctggcgctgatcagaagccttatcttctactgccagctgaccggcagccgctgtattgccgaaggcgtagatagccttgagaaattcaacaaactgcaggcgttgggagtcgaccgctttcagggcagctacctctcggcgccggtaggcagggagaacgtggcggagcttcttctgccgctttcgggcgaggcggagcatcgcgccggcatcgcgataccggtaacgcccgatggacaacatcgggcattggcgacacttcagcgcagctccggccagtagccacggttggcgacgatcagttcatcaaggatagcttttgcgaccgaagcgctgggtaccgttttggacagggtcatcgcctgccagagcttctgatagcttccttcaacccaggcatcgaccaccagtttttcaaccgccacctgctgctccatcatccccttttgaaacagcgggatcttacccatcgccagcggctcggggccattaacgcccaccaggcaaggcacttcaaccatcgcggtatcgtcaaaattcgcgatagcgccgttgttttccacaatcagcagcattctctcctgggtgttaaaggcgatggcgcaggcgaggtcgacaataaaggtcgcatgcgccccggcatggaaatgcgcctctttggcactttgccgggcgacgatctctctggccatatcaaacacctccttctctctccccgccatcacttcattggcgcgagtaaagtcagggtctgaatgggcaacctcatagtcggcataaaaatagtacttcagataggtattgggtaacgtatcggtatccagcgcaaaaacgtccttcacctttttgaaggtctcaatccagctcggcgctttatgctgaaaatcctctttcggactgcaatagcccagctcggcaacgtggttttttaacgccggcattaaatcgttgccggccttatcggtaatgctggtccaccagccgaaatggttgaggccaaaataacggacgttcatctctttacgcgatttcagcccgagaatatcggcgaataacccttcaatagccaccggcatatcgcagatattaataattttggccgtcgggcgtagccgacgcgtggcctcggcaacgatcgccgccggattggaatagttgagcatccacgcgcccggcgaatacgtttccatgtagtcaaccagctcaaggacgccggcgatagagcgcataccataagcgataccgcccgggccgcaggtttcctggccaatcacgccatgtttaagcggaattttctcgtctttctcgcgcatctcatagaggccgacgcgaatatgcgccattacgaaatcgacgcccgtaaaggcttcctgcgggtcggtggtgaagctaaaagcaacgtgcggataatgttcagccaccagaatcgcacaggcttcgccaatcactcgctggcgatcgtgatgattatcatagagacgaatttcgcttaacggaaacctgtccatattttccagcagcatcataacaatccctggggtatacgtactgccgccgccggctatggtcacaacgaatttatttttcatcttccacctcattattcatgtacatctaaatagcgattcacggcattacggattttattaacccctaaaccataaataacctgaacgtgattgcctttgataatgacgctggtaccgccgctggtcttcagaatgtgttcctgaattaatgcggggtcccgcacgtcaacccgaagccgcgtaaaacagttctcgaccgaacagacattttctttgccgccaaggccaagaatgacctgctcgccggaagccttgtcaggcgcgcttacgcttgccggttggttagccccctccccctgctgctcctggcccggcgtacgcattttgaaacgcagaatcagaaacttaccgatataaaacatcgtcgcggtttccattaaccccagcgcgacaaacacaggccagcgcgtgaggtgcgctcccgccggaatgttgtaaacaataaaatcgataatgccgttggtggcgcagacccgcacatccagcagccacgccagcatctggaaaaaaccgtccagtaatgaataaaccagccatagcaacggtgcggtaaagataaataagaactcaaaaggttcggtgatccccaccaggaatgaagtcacaatcaaaggaatcagcgtgattttcaacttttgcttattttccggcctggcggttgtataaaaggccagggccattccggcggtaccgaaaattttcaccatgccgtaggtgagaaatcgcgccgagtcgcttaacggcccagcgctatgagcaatttcagcgaggaaaatcggttttgcccccaccaccgtctgaccatcaatcaacagctgtccgccaatggaggtaaagacaaagggcgaccaaatcaggtggtgtagcccggtcgggataagaaaacgattgagaaaaccgtacagaaaaacgccggcggcgccgaaggttttcatcaccccggtcagcgccgatatgccgtgttcaacaatcggccagacgtacaccgtggcgatggcaaacacgccgaccagcgggatcatcatcatcagcaccagcttgctgttgccgtagatagagaaggcgccgcgaaactcaatgtcgacaaaccggttgtgaatgcaggcgaccgcgcagccaaggataatgccaagaaacacgcccatatcaatgacctggaagccaaaaataaaggtttgtccgctgccgtagagctgcgcgttgctgctgccggcggccaggcgctgcgtcagggttagccaactattattcgccgccaggtacataaaccaggtcattgcggcaacaaaagccgcttccgcttttcgggtttttgccagcccgctggccagcccgaggcaaaagaagaagccaagattgttcatgatggcccagagcatgctggaaacgtatttccccagcagataaagcgagctctcttctgcgacccagattttattggttgtcatactaaacaacgcaatcagcagaccaataaccggcagatacaaaaccggcccaatcatggccttcgaaaaatcctgtaatttttttaccccgatcatcctcaccccctgtcccgcacatcggccgtcagcgcccgatacatgcgtttcagcctatgcgccggcagacataattcagagcggtgaaatcgtcatctgtgatgaaagtcatatctctcttgcggcaacagatatataagtaaaagcagataaatagatgacagagacaaaacaacgccccgcaatgataaaaatacgttaattattaaaaagataaaattataatccgctgacagaacacaccacgagaaatctataagtgatatataaaacaatcgcagacaggctaaaaaatcgcatcaatagcgatgaattcgaggtgggagatgcgctaccgagtgaaaaagcgctggccggggagctacaggtctccgtcatgaccctgcgcaaggcgctcacgctgctggaaagtgagaagctgatcgtcaaacgccacggcagcggttcatacgtggcgcgtaagagcaattatcgcggcggggaacttgacggcttcaactaccagatgcacatcggcggcgtcaccaactatcgcaataaggtcattgagttcacgatgcttgatgcgcctttggctatcgcacaacagttgaaaattgagccgggagagaaggtctattacgtcagacgcattcggatgattgacgacgtacctattctgattgagaacagctatataccggtggcgatttttccctggctaagcgttggaaatctggaaagatcgaaatttaactatttcaagaaagagtgcaatatcaccatcctggagagccaccgcagctataccccggttctggccacccgggagcaagcagagctcttacaggttccacaaaacagcctgctgctacgggtgcagtcgatcagctatgcccataacaataccattgttgatttatccgatatttaccagaataccaacaaatacaatgttaaacatattacgcgccgctaaataccgcgggatacggctgacgcaggccaccgagagccgtccagcgtcagctgacgatagacgacagctgacgattctgcgtcggcaaacgactaccagccgcagacgttagtctcttcgtcggactcgtagccgcggacaatattaatcagatcttttaccgcatcggccgccgtctgcggatcctgcagctcagccagagaagcaaactcgctatcgaccgagacgccgttattattgttggtcaccgtcaatataaatccctttcctccggcgttttccaccgacagcgtggaaataagctcagccacggcctgggtggcgatatcagggacataaagggccatcggtttaagatacactttttcttttttatctttattattcccgttgatcgccgctaacgaatagcctttattttcactgttcatcatattacctatccctcaatcagaatgtcagggtcaacgtaaaaatcgacgttaaaaacggtatcctcggttaacgcctcgatgcggtgccacttttcgggcggaaaaacgccaaattcaccttcggcaatggtcagggtttccaccggttccgcgctggtttcatcggcatatccgaaatagcgtatcgcccctcgcatcaccgacaggcgcggatagacgccctgccgggtaccggcatccagatgccgcttccagattgaggccggcgccgtccgcttcgtccacagcggcgtgctccgggtatgcacatagtgggtaggaataatgattcgctgcatgattttgcctctcttaacgcaccacatatacggtcgaaaatgggaaaatatgttgcatatgatataccccttttaatcattacgggtattattttttaccgatgcgctttcctaccccttattgtactcattagggattagatctattcaaaaataaatatgggcgattttagataaactaaaaccgcccatattaaaaggcaaattacttattttcaggtgaactgagcggtcctggtttaccgattaaatacccctggaccaggtcacagcctaatttgcgtaaggactgcagctgctcttctgtttcgacaccctcggccacgatgcgcatatgcaggcttttacccatgctgataatcagccgcacgatatcgaggtcatctttctgatcgggaatgttaatcacaaaagagcgatcgatttttatcttatcgaacgggaagtagcttagccgcgatagcgaagaatagccggtgccaaaatcatcaatggagatctgcaccccgagctcgcgcagctggctcaggatctcgagagaacgggtattttcgttaaagacgtcagactcggtaatttccaaatccagccgatacggatccagcccggttgttcttaagatggttaccacggtatcggtcagtgaattgttcattaactgaaccggcgacacgttaaccgacactttgagcggcgacgaccagctggcggccgcttcgcaggcggttctcagcacccattcgcccaattgattaatcaggccaatcttttccgctaccggaataaattcggtcggcgggacgctgccgcgcagcggatgaaaccagcgcaccagcgcttcgtagccgtagatttcaccgttcatggtgtcggctatcggctggtagtaaaccctgaactcacctttgttcagcgcctgcatcaggtcatcttcaaaggatttattctcctgctggcgctgaagcagtccgggacggaatacctgaacgttgccggaaccctcttttttcgcttcatacagcgccaggtcggcacatttgtataaatagtcggtacggctttccccgtcagagatgacaatcccgatacaggcgccaatctggatcagcgagtcgtaaatctgatacggctggctgatcttttcccggatcaccttcgcccgctccagcgccatctcttcggttaaatcatgggaaaccagggcaaactcgtcccctcccagccggtagagcgtttctgacgttttgcgaaaaaaggagagacggctggccaaatcctgcagcagcttatccccggcatcgtgaccctgggtatcgttgacgtccttgaaattatccaggtcaaacagcatcacgaccgccgagccgttatagggccgcacctgattgacgacctcctgcagacgttgccagaaagagagacggttgggcatcccggtcagcgaatcatgataggcatcgtactgcagacggcggttctgcacctgaagcttttcttttgaggcctgcaggtcggtcgccagtaatttcatccgcacgtgggcgcgacgcagggtgttattctgcttcagcatcaacagcccgagcgtgatacagagaacaatcagcagaatggaaatcgccgaatagatgtaatagagattttgtattttatcgtgggtcagattaaccagattaaaatcctgggcgagcgaggtggacgcgagcgaggtcaacggcccgtccagggtactcatctcctgcagcatcagcttcagctgcgctgtcgtcatggtgtccagctgcttatccagccggcccagaagatcaatcaggctgttaactatcgccttacggtgaggatctttgccgataaactttcccaaatcaccctgctgcagcagcgcaatctggctcatcataatttccagacgcaggcgcacctcatcgtggtcgcttcccttcacccccagccccatcgcgctgagtcgcgcctcgaggcgcatgtactcggagactatctgggaaacggaccacgaatcagtataacgggttaatttttgcagctcactttgccgctcatgcaccagataagttatgtaaccggtcacaatgaagagcgacaaaataatggcagtgagtattcgattcaagatcaaacccttactcaattataatcttcgaaacctgccatgccgaacgggaataataaatctgattctgcaattccgggctactgtcgtaaggataaacaataaataagggccctttatcacgaatgcgcatatattcgccgttcatttttaaagccaaaattaccggaaatttatgaaagtcgtccagggggacaatggtggtgtaatcgttgagcgccagcacccgggccgacttgcctttggcgccgactaaatccatgagtttactgagggaaatgccgtcaaagcggacctttcccgaataccatggcgtggtcgtcaccagcgtttccatccccagcttttctaatgcggcgacatcaaaaacggcggtatcgccctcattcgtattagtaatcaggccggaaatagttaaaacgggtttgccgacaggcgctggcagtttttctgcaaaagcggaaggcgaaaccatgacacaaaataaagctgcaaaaattaaacgcatttaactcacccttccgaaattggagacttgttaattgtaaaccatttaagtcatttcttaaaaggtgtccccgttgggttcaaaaattaaaattaaaaacaataagcgaagtcctaagctcgcattctgaacgggctacaagggcgttcatcccctggcgaagcaaacgctttatgcctttaaacgcccagagcaggtaaaaatcttttcacatgcccttctgcgcggtagtctcaggacaggcgcgaattcggaaagcgtctcattccaataattaaaaactcagcaacagacaggacaggtatggactcaacgttaatttctcagcgccccggcaaggaggcatgttcactcaaccgcgcccgcagagcggcctggggcagcttcgccggggccgtggtcgactggtacgactttcttctctatggcatcaccgccgcgctggtatttaaccgggaatttttcccgcaaatcagcccggcgatgggtaccctcgccgcctttgccaccttcggcgtcggcttcctcttccgcccgctgggcggcattatcttcggccatttcggcgatcgcctcgggcgcaaacgcatgctgatgctgacggtatggatgatggggatcgccaccgcctgtatcggtctgctgccctccttcaaccagattggctggtgggcgccggttctgctggtcctgctgcgcgccgtccagggctttgcggtgggcggcgaatggggcggcgcggcgctgctggcggtagagagtgcgccgaaaaataagaaggcgttctacagcagcggcgtgcaggtgggctacggcgtcggattgctgctctctacagggctggtgtcgctgataagctcctgcaccaccgatgaacagttcctcagctggggctggcgtctgccgttcctgtttagcgtcgtgctggtgctggcggcgctctggatccgcaacggcatggcggaatctgccgaatttgaacagcagcagcgcgaacagcagctgcagccgaagaaaaagcggctgccggtcgtggaagcgctgttccgccatccgggcgcgttcttaatgattatcggcctgcgcctgtgcgagctgctgacgatgtatatcgtcaccgccttcgcgcttaactattccacgcagaatctcggcctgccgcgcgagctgtttcttaacattggcctgcttgtcggcgccatcagctgcctgacgatcccctgcttcgcctggatggcggaccgctttggccgtcgccgcgtctatatcaccggggcgctgatcggcaccctcagcggcttcccgttctttatggcgctcgaaagccagtcatacttctggatcctgtttttcgcgcttatgctggcaaatattgcgcacgatatggtggtttgcgttcagcagccgatgtttaccgaaatgtttggcgccagctatcgctacagcggggccggcgtggggtatcaggttgccagcgttgtcggcggcggtttcacgccgtttatcgccgccgccctggtcaccttatccggcggcgcctggcatagcgtcgctatctacttgaccgcaggctgcctgctctccgcccttacggcgatgctgatgaaacccagccgccatggcgaatagcgtcgataaggagaaatcatgattcaggaaccctgctggccgctgcgctttagccaccagcagctaccggttggttactttgccgatcccacccttgccgagcagccgctgtttgcccgggcgggcgacggtgaggcggtggctcagctctggcaggccccgcaggggtttgtggtgcccggaagctaccggaaatttgccgaactcccggcggtgagcgagcagttcgccggccagggatggccggtctggcagcgccgctccggcggcgggctggtgccgcaggggccgggaattgttaatctcagcctggcctggccggtctatcactcgctgggcgaagccgcagagccgatttatcttttcctctgcggcctgttgcagcgcacgctggcgacctttggcgtggccagccactgccgggcggtcagcggttcattttgcgatggtcgctataatctggcctgcggcgagggcgagcatgtgcgaaaaatagccggcacggcccagtactggcgaccaatggcggaaggccagggccatgtggttctcgcgcacgcggtggtattgctggatgccgacctggcggcggctcaccgggcggccaatgatttcgaagcccggcttggcagcgggcgggaataccgcgccgataaaaccgtgaccctggcggagctggtttcagaaggcgccgatttgatgccccgctttcgcgaggcgctgacgcagcagctggaaaatatcagctgaaggtcgccttcagatagcggctaaacgtctctaccgcccgcgatacgcgcggcgtgtaggggcgaatgacgtacagactttccgcaaacgcatccaccggccgccatcccggcagcagctcctgaaccagcccgcggccaatcgcctccctggcgctaaaatccggcagtaaggcaacgcccagccccgccagcaccgcgtcgcgcagggattcgctgttattggtggcaaacggcccctgcaccttcacgctcacccgctcgtcgtcgcgctcaaaggtccagtgcgggctttgcggcccgcgcgggtaggtcaggcattgatgctgacgcaacgcgtcaggcgaatcggggcggccaaagcggcgaatatagtccgccgaggcgaccaccagggtagccgtacggcacagcggccaggccacgtgggtctccggcagcagctcgcggcgacagtggcgaatagcaaggtcgaacccctcgctggcgagcgacaccagtcggtcggtcacctccagctggagatgaagctgcggatgctggtgcagaaaaggggtgatggccggaaccagctgctgtcgagagaacgccaccggcgcggtcaggcgcagcgtaccgcgcagggggccgccttcctcgtcgcaggtgccggtaaagatctcgcgaatctgcccaaacggctcgttcagctccgccaccagccgcagaccatcttcgcttaaggtcacgctgcgggtggttcggtgcaccagagttttaccggtaacccgctccagctcgctaattttctggctgatggcggatttgctgaccgccagcttttccgcggcgcgggtatagcttttttgctcctccagcaccgtaagccagtacaggtgggtccagtaaatttccgggcggatctcgcgcatagtaattgttcacaggtaaaaacaatgagttcaaatatagcggtttttgccggcttcagcacgggttagcatctctctcactaaggtaacccgacaataaggaccatctgctatgccattactgacgtttgatatcattgaaggacgcagcgaaaacgagatcaaaaccctgctggatgcggcacatcgcgccgtggtgcaggcgttcaaggtgccagagcgcgatcgctaccagattgttcacgaaaacaaagctcatcatatgattattgaagataccgggctggggctgacgcgaagccgggacgtggtggtggtgagggtatataccagcccgcgcagcgaagcgcagaagcagcttttttatgccaccctgcaggctgagctccgggagcactgcgggctgagcggcgatgacctgatgatctcggtaatcagcaaccacaaaggggactggagttttggctgcggcgtggcgcagtacatcaccggcgaactttagccctggcggcgatgggactggcgcacgatgggttccccggtgcgccaggtcgccgtcggcccttcagctgcatcgatgagccgattcaacgcctcttccaccagccgctcgcgccgctgatcgtaagtagtaagctgccattctggcgccgccgcttcatcgatattatcgaaaccgacaatacccatcgttaaatcgcgctcgcgcagcgcctgaagcgcgcctatcgccagaatatcgttttcacagaacagggcatccactctttcgcctgcggacgtcgcgtccagatactcgctcatcgccgcatatccccgggtacgtaaatactgtccggcaaccagcagagtatcaagccggcaacctgcctgctccagcgccgcttcgtacccttccatcctcattaaatggtgcgaggcggtatccggccctttcatatagccaaaagtgcgatgcccctgcgccagcagcagttcggcaagctgttttccggcaatccagccgtcaatattgaccacctggatttccggatgatcggtattacggccaatctgcaccagcggaacgcgatgaatttcagtggcaatcgcgatgagttccggcgtcaggaccgtggccataaacaagataccatcaacctggagctggtaagccagcgccatcgccgtgcgggtgttttcttcgtcggtaacgttaatcaccagcgccatgtagccgcgattctgcagctggcgggtcacttcgttaagcagtagcaccatattgggattgcgcagctcgtctaccgccacgccgataatatgcgttttcttttgcgtcaggctacgcgccagtaaatttggtcgatatcccagaatattagcggctttcatcacctcttcccgggttttgggctggatagaagccccgggggtaaatgcccgggaaaccgtccatttggagacgccagccagtaacgcaacgtcgctggcggtcgctttttgtcgtttaggggcgctcatactcggttttaacgttcctgataaaaaacatccaatagaacgtaaaatacagcaagataaaatccgctcaacaaaaaacgcgccgcgttctcccgccccccggagggaaaacgcggcccgttatcactgacttaatgtggcgttgagggcatcaatagacgtccgtagccctgcttcaacgctcatcgtcaggtcctccatctccagcgacacataaccgttatatccggtcatgcgcagcaccgagaagaactctttccaccacttcaaatcctgtccacagccaaccgccacgtagttccaggtgcgggttttggtctgcgtaaccggctggtattccagtaagccgtcgacatccgccagcccgcgttcaatacgcgcgtctttgccgtggacgtgataaatcaccccttcaagcttacgggctgcggcaatcgggtctgcccccatggcgatcagatgcgacggatcgagattcatgccgatgatgtcgccaaccgcctcacgcaggcgcagcagcgtgctcgggttgtaaaccagctggctggggaattcctcgagggcaatctgttcgatgccgtattcagccgcatggcgggtaaaagcctgccaccagggaatagcaacctcgttccactggtaatcgatcacgcctggcatatagtccggccaggaaaccgtcgaggtgatccagttagggattttatcgtccggcccgccgcccggcaggccgctcatcatgactatctttttcactcccagcttcgccgccagctcgacggtacggtagctgctggcggtgtgcttctcgccaagggcgccgggggccagcgggttacccgaacagttcagcgcgacgatctccattccgcgcttttccagctcgccgcgaaacgccgccagcgctgccggagaagccagcagttcttcagttttaacatgcggacaaggcgaccagccgcctgcggtcatctccacgccctcaatgccgtactgcttgacgcgatcgagcatttccgggaacgccaggccggcgagaacatcggtacagagtgccagtttcatattctatccttcttaaatgagtgtccttcgaggatctgcataaacgcgtctttgctgtcggcgctggccagcagcgtggttttcacttcgtcatcaagcaggtctgccagatccgctataacatcaatgtgttcattgttttttgccgccacggcgaccacaaggaaggccactttaccctccccccagcccacgccatccggaaactgaagcagctggaaaccggtttgccgcaccagatcaataccctccttgctgcagtggggcatggcgacccccgccccgagccaggtagagagcgccttttcgcgctccaccattgattcaaaaaaaccctcgctgacgtagccgctggcctgcagggaatccgcggcaatacgcagcgcctttttctttgaattcgcccgacagccaataaaaatatcttctggtttcagagttaacatgcgcctctcccttcgttaatgggtcagcggtagagcgccggacactccggcagagagacggcgtgcttttcgccatccttcagcgacgccaggccggcatcgcataccatcgccacgacaaatccgtcccacgatgatggcccgctcatctccgcccccaggtttacccggtcaacgaaattctgcacctcgcgatcgtaggcggtggcgaaacgttccatacaggttttggggatagcgcggctataaccctgcgccgaacggacggtggtaagtgcctgttcggtcaacgcgctgatggcattttcgccaatcacttcacagcgaatgtcatagccgtaatcgcagttaacaaacagctcatcatcaatacgtacgccggattcagtttcaaaaatcacaatcaacggatcctgcagatgcgcgcaggctctgcgcgttttcttctgcggtttatcgacgcgcaccgaaacgatattttcgttaagcagatagcggataatatcgatttcatgggtcgccgaatcgttaatcgccatctccagggtgtagctctccggcacggaggcgttgcgatgggcgcagtggatgagcaatatttcccccagttcaccgctatccagagtggcttttagctggttgtaccccgggtcgaaacggcgcataaagcccagctgcagcatacgtttgccgtaggctacttcagcatcaataatcgctttggcttcattggcggtcggggttagcggcttttcgcaaaacaccggtttacctgctttaatggccgccagaatttgttctttatgtaccgggccaatagagcaaataaagatcgcatccacgtcgtctgattgaatcatctcgactgcatcgtaatagggctgagcgccatattcgcgggcaatagcgtcggtcacattacgattgatatcgcagacggcgctgaccctggcgttctggataaccgtctggaaacgctggagatggtcgcgcccaatcatacccaaaccaattaaaccgatattaactgtcatatattcctccacgttgctaaatcagaatctgaatttttgttcaatttgttcgagggttaacccgcgggtttccggcaggaacttcaccagcagaatcagcattatgacgttggtagccgcgaagaagccgaaggtcattccaccgccgtagctgttgagtaaaatcgggaaaatagactgaatgatgaagtcaaatatccataaaccgaataccgcaaaacccattcccagaccgcgcatccgcagcgggtagatttccgcgagcatcagccagaacaccggtgcgatccaaccctgcataaaggtcaggaacaccagcatcagggcgagaatgatgtagctggcaccggtaaagttggcgtgcaagccgctgacgccatcgacggtttccatatggaagaagagcttgaacgagaggccaatcaacaccaggctaagggtgacgccgatctgtccggtaaagaacattttccgtcgggaatgcctgccaattaacagcatccccagtagcgtggccagaatagagacgacgccattagccacggcgccggtcaccgccgccgcatcgccaagtccggtggctttcagcaccgtcggcgcgtagtacataatggtattcacgccggttacgcgcgttgccagcacaatcatcaggccgatcaaaatcagctgcagtacccattttctcttcagctcgtcaacaaatcggccatggttgatgccaatctggctcacctgctggatatcgcggatctcctgctccacctcttcgggccgacgaatcgttttcagcaccgcaaccgctttgtctatttgccccttacgcacgaagaagcgcggagactccggcattaccagcataccaatccacagcagcgcgccgggtagcgccggaatggccaacatcagccgccagttgtgcgacatgtcgggatagaaattgacaatggaagcgttgacggagtaagcgagaaactgcccggtgacgatcatcagttcgttgaccgtcaccagccgttcacgctgcgcgggtcgcgccagttcggaaatataaatcggcaccgtcactgacgcacagccaaccgccaggccaagaataaagcgggcgattatcatcgacgacatatcccaggcgacggcggtaccgagggcgccaaagataaaaatcaccgccacccacagaatatttttccgccgtccctgtcggtcggacagccagccgccgccgacagagccgattgccgcgccgaataataaaaacgatgtcaccagcccttcctgcagaggagtgaggccaagatcgtttttcatgaaaatcagcgcgccggaaataaccccggtgtcgtagccaaagcacagtccaccgatggttgagacgagggttattaatctgattttcttatcattatctgttttacgactttcagttatcacatgatcggtcattttgttgtcctgtcagggatgagcgttctatcgttttgtttttatgaataaaaagatcacattgccgatccagatacggcagattctggcatcaggaatacatttgcacctttttgcacccgggtgcattatttaacaacttgttatactccaccggattaaaaaatccataacaagttattttgaaatattcatttcgttaagggcgtcaactttttgctcattgaatggccaattttgtcgatcgcagtcacgatccgcagagcttgttgctttcggggggagaaaaatgcctggttcaggctaatggccggggaggaaggcaataaaaaggggaacacgtgggttaatccgcgttccccagagagccgaaaagctcatcaggattgccgggcgctggcgatacgctgtctggctttatgttcaatattttccagcagctcctgcacgtcgtcttcatcgatatcgagaaactggccgtccagcagggccgcatgaatatcatcgcgggtcaccgacaggcccagcggtacggctttggcctttacctcttccgcggccagcgggtgcgggtagcgtcgtcccaccaggttgttgaagacgatggccagcagcgccagcatcagggaattgagcaataccggcgtcagaacaaagtggtagccttcactctgcacccccgccccgccgaggatcgccgttaacgccaccgccccacccggcggatgcaggcagcgcaggaaatacataccggcgatcgccagccccgccgccacgccgcaggccagcgccaggttcgggatcgccattcccacggtcacgccaatcagcgccgagagcacgttgccgccgacaatcgaccacggctgggccagcggactgctcgggacgccaaacagcagcactgccgatgcgcccattggcgcgataaaccagatattgacctcgcctaacagccagtggctgaacatgctggtcaccgccagtcccgtcccggcgccgagagaggccagaacaatatgttttctggcaaccggcagggcgtgcggcttgaggcgaccgaggaaaatgcggatccgcgaaaagagcgatccgggtaaaacgcttaacatcgtgtagctcgcttacgtcataataagaacttatgtttcattttctttttttaaccttattttaacaaccatgtctttgtcgtggcttttcgtcattcattttgtgaatgtaaaaacggcgcgcgctacgttaaaatcccctcacctctgggtatcagcattctatggattgaaggtcaaacacgttgaataacaagataaaattagagaaagagatcgcatgggccagtcagaatatgccgcgcaccctgcgtcaggtcgccgccctgccggatctcagccaggtgcgtctcgcctgctgtatgcacctcgatatgaaaatgatccccctggtgcagggaattctggagaaaggggcgaaggtttttcttaccacctgtaacccaacgacggtgcaggatgacgtggtcgcctggctggtggagcgcggcgcggaagcctgcgcctggcgggatatgagcgacgccgactggcagcaatcctgggaaaaagcgattgcctggcagccgacgcatctgtgcgaaatgggcgcggatattaccaccctactgcatcagcgcggggagtttggcaatatcgtcgcgggccttgaggcgaccggctctggcgttagccgcctgggcgatattcgccccggctacccgatttttaactgggatgatttgccggtaaaagagggcctgcacaaccgtcatatggtcggcctgaccgcctggcacacctttttccagacgacccacctgaccctgcatgagaaaaaagtgctggtcatcggctatggtctggttggccagggcgtagcggcggcggcgaaggccttcggcggccaggtgatggtagcggaaatcgacccggcgcggagactacaggcggcctacgatggctggcacgtcgttgaattacaggaggcgattgcctccgcggacgtggtggccacggcgaccggcggtaaaaaagtcgttaaccgccaggcgctggataagtccaaagacggggtgtttattctcaacgtgggtcacgtggcggaagagattgactgtgagtacctgcgccagttccgtcatgaagaggtcatgccctgtatcaacgcttaccggatgggtgataaaaccgtttatctgatggcgaacggttcaatgctcaacctgaccgcgggctttggcgatagcctgaacgcctttgacgtgaccctggcggtaatggccagcggcattcagcatatcgtgaccgacggcatgacggcaccggcggacgtttacctcctgccacagagcgtatggcaaaaagcgctgtaagcacgtgcgctgaataattttcccggaggcggcgcgctgcgcctgtccgggctaccggcccgcagacagcggtggacttgtagcccggctaagcgcagcgccatcgggaagaaaccacgccaatccatcactccggcacattccccgcaggcggcgcgctgcgcctgttcggactaccggcccgcagacagcggtggacttgtagcccggctaagcgcagcgcgagccggggagaaaccacgcctattcatcactccggcacattccccgcaggcggcgcgctgcgcctgtccgggcaccggcccgcagacagcggtggactggtagcccggtcagcgcagcgccaccgggaagaaagcaatgcctacagcagggccagcagaaatatgacttcgcccagctcaatcgccgcgcctaatgtgtcaccggtttgcccgcccagggtacgcttcagcgcctgacccagcgcccaaaccagcaccagagtgataagcgccgcccgcagaccgttgaccccgagcagcagcgtcgccagcgccagcgcgatccccatggtaatcagcatctgccgcagcgtgattttgccgataaataagttgcccagcccctcttcccgggcgtagcgctgacgatacatcagcagcaccgccataccgcggccgacggcgcaggcggcagccagcgcggcaagcgccgacgtgccgcgcagcgccacttcgctgaccaccagcactttggcaaccagcacaaaaatcagcgccagcccgccgtgagtgcccagccgactgtcgcgcatgatttccagcatccgctcgcggcggcgggcggaaaagatgccatcgcaggtatccgccagcccatcaagatggaacccgccggtcaacagcgccagcgccagcacgccgagcagcgcggcgagcgggccgccgcaccacggctgcagcagcatcacaacggcgccagcaatcgcccccagcagcagccccaccaggggaaatgtaatgatactgcgttgatattgttcaatttccagcccctgggataaacgcgccgggaccggcaggcggctgataaatgataatgcggtaaaaaaagacttaatcattgagtgatgactcctgtcgataaaccccgcggcagcggttattcacgcccgccaccgaccgtgacctgacttatccgcgcggctgccgcgcggagaaagcctgcccgcgttcttccagccgccagtgggcaagccgggtatcacggtggtgttgaatgcgcacggccatttggttgtcggagagccgggaggtagcgatgaagatcgccgaaacgaaagagttgagtaaagattcggcatcgcggcgttggccgctaagcgcgtcgccggtcatcagtatcatcgcggcggcacctgttgcagggacagcatgagataaacccttccgatatcaatatgtttacggcggaagtataccaaattcctgggtaaaggttcagcgtcgcgcgggcgtttttgctaaggaactgtgaggtcacgcaagaggaagaagaggaactccggcggcgagcgccgccggagcgcattaacggggcttactcggcagatttatcttcgactttcgcttcgcccatcgctttcagctttttagagatatcgcgacgttctttggagatctcggcgtttttgatgatgtaatcgtcaacgcgatcttcgtaatcgctcttcatgctggcgatgatgccctgaatagcttcaacgctcatgcccggcttgatgtagtcgctcaggttgtccagcagcagtacgcgcttctggttatcacggatctttttctcaacgtcctgaatttcacgctgcagtttgttcttacgacggtacaggcgaacaaactccagtacgtcctggaaagaaggcttagttgtttccatttttatacccctaatatttgagattcggattcgctaaagcgactgctacatagggctaacataactgttagcagccgctgatgacaatgttttttcctttgccgttatcataaccctaaacgctgctgaatcgaagcaagcgatggaaaaaccacgtgagtctggtctttatttacgcaacgcacggcagattaaatgcgacagcagttcgagctggcgcgccagctcgatagttaaccagacataaccgtgaatgggcgtttcggagaaattgtcgtcctgctgctctttgatgagctggcgcagttcggcaacgatttcgttgagcttttcattgttggcaagaatcggctgcggattgccctcatacaatgcgtgggcgatagtcagcaatgtttgctgggtcatttgctgagtttcgcgcagcgtatgagcgttaagcatcacgaagtggccgggacgcgacgcccagtaggcgttgatttgcagctccagcatgcacaccaggttacggctaacggtctggatcgcctcaaagatggccttctggatatgcgtctctttgctggcaggagtaattaatccgcgcattttcaccacgtcgttaagcaccttctgcatatgcttttccagacgcggacgctcaacgaggttcggcgagaagcccgcctgatacagacggttgaaggcggtgacgtagctggccatctggatgcgccagtgcaggaaagcccgctgcggccagataccggtaaacagcatcgccagcagggagccgaagataacgtcgccgcttcgccacagcgcggtggtcatgtcgcccggcggcgcgccgaccactaccgccagggtgatgccgatcagcagcgcctggtagggctttttgcccagcgccagccagccgcagaggaacatcgccaccgcgcaccacagcagcataatgggcagagagataagctccagcttgagcgccaccagcccgagcgccgagccgaggatcgtgccgccgatacgttcaaacgcgcgcggtacgacgtttccccagaaggagataggccccataaccaccaccagggtgatgaggggccaggtgccttcaggaacgttaagcaggcgcaccagcacaaaggtgagcacaaaggccaatgctattcgcacgccatggacgatgcggtaatggcgatacagccgaatttcaaatggcttaagtgatttatccgcgcgcacaacctactccgacacaacgaaaaggccaattgtaactgctttttcgccgcaagcatcacgcgaatgtaataaaccttgtcaaacgaagggacaatgttctacttcacggccggctcgaccgcgacatacatatcaatatcccagtagccgtcctggttaccatcgttaagatagacttcaaaacagggcttcatcgccatctgatgggttttgctttccatcaggctctcgaagaactggtaccacggcgtcgcaaagtcaaaattctcgactctggcacgggcaaccgcataatccccgccggcgatttcggtcatcatcacgccttcgctaccctcaggaatctggtagtcgtccgccaccgtgacggcggtatcgcagcgcagcttttccgccgggacttcgtccgggttgtcgtagtaaacggccacccactcctgcgccggcacctggctgttatcgacccacatcatcagctgttcaaacccctgttttaccgtctgctcccagggaccgaccagatgaaaaccagcaattttcttcttgcctacggatttaacgttatagtccatgctgcctccactgttgataaaatactgtatgtatatacacataaattagcagtgctatcacccacagtatgtgcggcaattcacaaatccgcgcggcaagaagatgaaaaaatcgccgccatacgattataaactgaacggtagctcaacgccgatgctggccccaacatcgtcgctggcgctgtggttagcgtcggtgtaccacagggaggtattcaggcgtaccgttggcataacatcgccgctccagcccagctgtacgcccttcagcgtatcggcgcgcgggaaggctttattgattcgctggttttttggattgacctcagcgtagaccaaccgcgcgctccagcgctgattatcttcggttaccagctccaccttaccggcatataaacgcccgtcgccgcccatcgcatcgcccagcggatagccctgctggtagtagccgtctttatagataaagtggttatagatgtagttagtacggcccatgttcgagcgggtatcgtgggcttccagataccagttaaccgcattgctgttccactggtgatgcccttccacaccgccaagatagaggtgcgccgagggtaaatatccggcttcgtcctcgccgatcatctggccgtaaatgctcaccggccagccgagggtgggcgccagcttcagcttgaaatcaaaaccggccagctggttgccgggatcgtcggccgagtcgccggtgttatcattgccggtgaggccgtcccagaagctgctgaatgaggaaggccgcccttcgccgccccactgcataacgcgcgaggctcccagctccagcgaggtgagcggtgaaaaagtcaggcggccgccgaagattttggtatgcggtacggcggcgtactggttcatctggctggcggaaagctggtactgccaggggccaatccagcttagccatgaggtttccggcgcccgctgttcggcgcgctgcagcagaaaaccggtcatgggacgcgcggcatcggagcggatcaggctaccttcatagcccggcccccaccactgggggatttgcccgaacgccagccactggttccacagcttaaccgcgccgtacgcgccgttggcgttcacgctcgaaccgttactgatgcgcttgtcgccttcaacattgccctgcaggtgcagatcccaccattcgccgctgttgttcagggcgagagaaagcgactggtcggcggggtaagattgggcaaacccctgcggcgtgcccggcttatcagtggagctgtagccggtaacgcgcacgtcagctttcagcgcgcttaatcgctgatttacccgacccagtaccacccgctctgcggacgttgtcggatgggcattggccagcgcgcgcttaatctcctcttcgctcagaggccaggtcgacaggctcaacgagagggttccacggtcggataaccaggctaaatcattgcggaattcgttatcggccagaacgaggccggaggcaaaaccagaagtgctaaaaacggcgaacagtcccagagaaagcgcactacgcgcaaagtatttcattttcccagctccatttatggcgcacaagcgccaggctttttcctgaagggtgaccgggtaaggtaatggagtgaaagtaaacgaagcgccaaccgaagcggcataataatcaaacagctacgagatgccgctccgggcggagcggcggagaagttacagtttttgatgcagataatcgctaaagcgcgacagcacgccgcccttgccaacgctttccagcgtcaccagcggccagtgggccaccactttatcaccatcgtaaagggagatttcgccaacccgctgatgggcggcgatcggcgcttccagcactttgttatccagcacgtatttggccttaatgcgcgagacttccgacttcggcagcgctaaccagaagtcctgatcggtccccagcttaatctgctctttatcgccataccagatacgctcaacgccgacctgcttgccgtcctgcagaacctggacggtatcgaagttttgctgcccccagtgcagcagcttcgccgcctgctgttcacgccctttcgggctgtcggctcccatcaccaccgcaatcagccggcgctggccgtccaccgcggaggcaatcaggttgaaaccggcgcccgaggtgtggccggtcttcagaccatcgacgttcatggtcttatcccacagcagaccgttgcggttctgctgggtaatgccgttccaggtcaggctcttctggctgtacatatggtagacgtccggctcgccgtgaataatcgcccgcgagagcaccgccagatcgtaggccgaactgtgctgacccggcgcgtccagaccgtggacggtttcaaaatgggtatcctgcaaatgcagtttttccacgtagctgttcatcagcgcgacgaactgcggctggccgccggcgacgtagtccgccagcgccacgcaggcatcgttgccggagtcaacgatcagcccgcggcttaaatcgcgtacgctgacccgatcgccgggcttaaggaacatcagcgaagaaccattaaagaccgggttaccctgcgcccaggcgtctttcccgacggtgacgatgtcgtcaaaggtgatgcggtggctgtcgatagcgcgatcgaccacgtagccggtcatcagtttggtcaggctggcgggattgcgctgctgatgctcgttaccggcggtcaggatctggccggtggtgtaatccatcagcacccaggaaccggcctgaatagaaggaggcgtcacgttgacgggaaaatcattggcggcaaatgcgcaggaaacgctcgcagcgagcaaagatacagcaataaaaaaacggcctttcaacggcatatcctctaaattgacagattcgccgtcctttttacggaacttctcgtttcaaatcagggtttaattgcaagaaaatatgacatcgccgacgcgggacaaaggggatacccttctgatggcccggcaaatcgtttaccatgaaggctgctcgccaccaggaataatgaacagattatgcaagatagcgccagccagcccggatttttatttcatgattacgagaccttcggcaccagtccctcgctcgaccgaccgtcgcagtttgccgccattcgcaccgatgaagacctgaatatcgtcggcgaacccgaagtcttctactgcagactcgccgatgactatctgccgcagccgcaggcggtcatggtcaccgggataacgccgcaggaggccaatgccaaaggcgacaacgaagccgctttcgcccgccgcgttcacgatctgttcacggtgccgaaaacctgcatcgtcggctacaacaacgtgcgcttcgatgacgaagtgacgcgcaacattctctatcgtaatttttacgatccctacgcctggagctggcagcacgacaactcccgctgggatctgctggacgtgatgcgcgcctgctatgcgctgcgccccgaagggatcaactggccggaaaacgaagagggcttaccgagcttccggctggagcatctgaccgtcgctaacggcatcgaacacagcaacgcccacgacgcgatggccgacgtttacgccactatcgccatggcgaagctggtgaaaacccagcagccgcgcctgttcgactatctttacgcccaccgcaacaagcgcaagctggcgacgctgattgacgtgccgcaaatcaaaccgctggtgcatgtttccggcatgttcggcgcggcgcgcggcaacaccagcctggtcgccccgctggcgtggcacccggacaaccgtaacgcggtgattatggtcgacctggccggagacatcgcccccctgctggagctcgatgccgacaccctgcgcgagcggctgtatacgccgaaaagcgagctgggcgacctgcccgcggtgccgattaagctggtccacctgaataaatgcccggtgctggcgcagcaaaacaccctgcgtccgcaggatgccgaccggctgggcatcaatatccagcgctgtctggagaacgcccagctgctgcgggctaatccgcaggtacgcgagaaagcggtggcgatttttgccgaagcggagccgtttgtgccgtccgataacgtcgatacgcagctgtataacggctttttcagcgatgccgaccgcgcggcgatgaaaatcgtgctcgaaaccgagccgcgcaacctgccggcgctggatatcaccttcgccgataagcgtatcgagcgcctgctgttcaactatcgcgcgcgcaactatcccggcacgctggatgaagccgagcagcagcgctggttagagcaccgtcgccaggtctttacgcctgagtttttgcaggcctacgccgatgagctgcagatgctgtaccagcagtatgcggacgataaagagaagctggcgcagctgaaggcgctgtggcagtacgcgcaggatattgtttgattggcagaaattcccgggttgcggctaacgccttacccgggctacaaacaatggcaggactcgtagcccgggcaagacgcctcgcgtcgcacccgggaacgttgcttagcctttggcgcggctggcgataatcgcctcagccacgttgcgcggggcttccgcgtagtggtggaactccatgctgtaggtcgcccggccctgggacatggaacgcagcgtggtggaatagccaaacatctcggccagcggcacgtcggcgcggataatctggctgccgaaccgctcctccatcccctgcaccattccgcgacgggaagagagatcgcccatgatattcccggcgtactcttccggggtctccacttccacctgcatcaccggttcaagaataaccgggtcggccctgcgcgccccttccttgaagccaaatatcgccgccatccggaaagccatctccgacgagtcgacgtcgtgatacgaaccaaacgtcagggtcgccttgatatccaccaccggatagcccgccagcacgccggtgcccatcgcttcgcgcagccctttttccactgaagggatgtactcgcgcggcaccacgccgcctttggtcgcgtcctcaaacacgaaaccgcttcccggctccagcggttcaagggtcagcaccacgtgaccgtactgccctttaccgccggactggcggacaaatttgccttccacctctttgaccgttttgcggatcgtctcgcgataggtcacctgcggacgcccgatattcgcctcgacgccaaactcacgcttcatgcggtcgacgataatctccagatgcagttcgcccatcccggaaacgatcgtctggccggactcctcgtcagtatgcagacgaaacgacggatcttccgccgccagccgctgcagggcgatacccattttctcctgatcggctttggttttcggttcaatcgccagcgaaatcaccggctccggaaactccatccgttcgagggtaatcaccgcatccgggtcgcacagcgtgtcgccggtggtgacatccttcaggccgacgcaggcggcaatgtccccggcgtgcagttcgtccacctcatggcgatcgttggcctgcatcagcacgatgcgtccgatgcgctctttcttacctttcaccggattccacaccgcatcgccttttttcaacgtcccggaatagacgcggataaaggtcagctgtccgacgtagggatcggtcatcagcttgaaggccagcgccgagaacggctcgtcgtcgcccggatgacgttcagcggcctgccctttttcatccacgccctgaatcgccgggatatccagcggcgacggcatcagctcaaccaccgcatcgagcatccgctgcacgcctttgtttttaaacgcgctgccgcacagcaccgcctggatttcccccttcaccgtgcgctggcgcagaccggcgacgatctccgcctcgtccagctcaccggtttcgagatatttgtccatcagttcgtcgctggcttccgccgccgccgagaccattttctcccgccacagacgggcggtttccacgaggtcgtcaggcaccggcgcatagctgaaggtcatcccctgggtggcgtcatcccacaaaatggcgcgcattttgatgagatccaccaccccggtgaagtgctcttcggcgccaaccgggatcgcaatcggcaccggattggccttcaggcgatcgatcatcatctgcaccacgcggaaaaaatccgcgccggggcggtccatcttgttgacgaaggccagccgcggaacgtggtatttattcgcctgccgccagacggtttccgactgcggctgcacgccgccgacggagtcgtaaaccatcaccgcgccgtccaggacgcgcatggagcgttccacttcgatggtgaaatccacgtgcccgggggtatcgatgatattaatccggtgcggctcgaagctgcggtccatgccgggccagaagcagctcaccgccgcggaggtaatggtgatcccgcgctcctgctcctgcgccatccagtcggtggttgccgcgccatcgtgtacttcccccagcttgtggctcatcccggtataaaacaggatgcgctcggtggtggtggttttaccggcatcgatatgcgcggagataccgatgttgcgataacgttcgagggggatgggtcggggcatgatgcgtccttagtcattgtgactgttaacaggcggccggaattggccgccgttcatataacggcatctatcatagtacaactgtacgagtatattcgaactatttttgctatcgttactattggtgaagctgcgacgacccgcgtggctttagaaaagcagtttcggtatattaccggccagccgccgatacaggctgctgctcacggagctgcgccgccgccgacacaggaatattatgatcgccaatcaccccgaacgtgaacaaattcgcctcgaaaatgtccttttcgctctcggcaacccgctgcggcttgagattatccgtatccttgccgacggcagcgagcagagctgtaacgccctgcgtcatgaagatgtggcgaagtcgaccatgacccaccactggcgcgtcctgcgcgacagcggtgtgatctggcagcggcctcaggggcgggagaatttgatttcgctgcgccgggaagatttagacgcgcgctttcccggcctgctggatacgctgcttaaggtcatgcagcacgatagctaaagcctgcgcgccggcccctactcctcaccggccagccgccgatactgggcaaagcgggcgcgcgcatcctcctcggttctgctaaaaagcgcatccgcgagatgcggcgtcgttttgtgcagcgaggcgtagcgcacttcgccaagcaaaaagtcgcggaagctctcctccggctcttcggaatcgagcataaacggcgtcttgccctccgcttcccgctgcggatgatagcgccacaggtgccagtatcccgcttcaaccgcccgtttcgcctcgcgctggctgcagcgcataccggctttcagcccgtggttaatgcaggcggcgtaggcaatcaccagcgacggtcccggccaggcttcggcctcggcgatcgcccgtaaggtctgatctttatcggcgcccatggcgacctgggccacgtacacattgccgtagctcatcgccatcatgccgagatcttttttccgcgtgcgtttgccctgcgcggcaaacttcgcgatggccgccaccggggtcgatttagacgactgcccgccggtattggagtaaacctcggtatcaaacaccagaatattcacgtcttccccgctcgccagcacgtgatcgagaccgccgaagccgatatcgtaggcccagccgtcgccgccgaaaatccactgcgaccggcgcacaaaatagtcgcggttctgccatagctgctccagcagcggcacgccctctttttccgccgccagccgttcgctgagccggtccgcgcgctcgcgggtaccctcgccttcatcctgcttcgccagccactggcgcattgcgtcgctaagttcgtcgctgactggtagcgccagcgcggcggtcatctcctcggcgatttgttgacgcaccgcctggccgccgagcatcatgccgaggccaaactccgcgttatcctcaaacagcgagttcgcccatgccgggccgtggccgcggtggttggtggtatagggaatcgacggcgcgctggctccccagattgaagagcagccggtggcgttagcgattagcatccggtcgccaaacagctgggttatcaggcgggcataaggcgtttcgccgcatcccgcgcaggcgccggaaaactccagcagcggggtttcaaactggctgcctttgaccgtcgtcttccggaacggattgctcttcggcgtcagcgccagcgcatagtcccagaccggcgccatctggcgctggctatcaagtgactgcatttttaacgccttgccgcgcgaaggacagatatccacacagttgccgcagccggagcaatccagcggcgaaatagccagatggtagtggtacgccttcgctccctgagcgggtttgctcagcagctcagccggcgcggcgtcctgctcttcgccgttgagcagcgccgggcggatcgccgcgtgggggcaaataaaggcgcactggttacactgcgtgcagccctccggctgccagaccggcacttccagcgcgatcccgcgtttctcccaggcggcggtgcccgagggaaaagtgccgtcttccatgccgacaaacgcgcttaccggcagctggtcgccgcactggcggttcatcggctgcagaatatcgcggatgaaatccggcatcatggctgaagcctgcgccacgggctcatccagcgtcgcccagtgtgccggaatggttacctgatgcagcgaggccatgcccagctcgatcgcccgctggttcatctcgatcaccgccgcccctttgctgccgtagcttttttcaaccgcctgcttgaggtaatccgccgcggtctgcgggtcgataatcgccgccagcttaaagaacgccgcctgcatcagcatattaaagcgcccgcccagcccgagctcgcgggcgatatccacggcgttcagggtataaaaatggatattttcccgcgccagatagcgtttaaagccgaccggcagatgctgctccagctccgcatcggaccagctgcagttgagtaaaaaggtcccgcccggctttaacccatccagcaggtcatagcgctcaacgtaggactgctgcgaacaggagataaaatcggcccgatggatcaggtagggcgaattgatcggccggtcgccgaagcgcaaatgcgaaacggtaatgccaccggattttttcgagtcataggaaaagtaggcctgcgcgtagagcggcgttttgtcgccgatgattttgatcgcgcttttattggccccgacggtgccgtccgagcccatgccccaaaatttacaggcggtgatgccatcatgcgagaccgccagcgtctgctggcgcgagggcaacgaggtaaaggtgacatcatcgacaatgccgagggtaaagccgtccatcggcagcggtttattgaggttgtcaaagaccgccgcgatatcgttgggcagaacgtccttaccgccaagcgcgtagcggccgccgacaatcagcggcgcatcgtcgtggtggtagaaggcgtttttcacatccaggcacagcggttcggcctgagcgccgggctctttggtgcggtcaagcacggcaatgcgctgtacggttttcggcagctgagcgaaaaagtgggccagcgaaaaagggcgaaacagatgcacgctgagcagcccgaccttctctcccgccgcgttcagcgtatccaccacttcctgaacggtgtcgcagaccgaccccatggcgataatcacccgttcggcatccgccgcgccggtgtagttaaacagatggtactcccggccggtgagcgcgctgatttgcgccatatagctttcgacaatgtcgggcagcgcctgataaaaacggttacccgcctctctttcctggaagtagatatccgggttttgcgccgttccgcggatgaccggatgatccggatgcagcgcgttacggcggaagctgtcgagcgcggcccggtccagcagcgtcgccagctggtcatattccagcacctcgattttttgaatttcgtgcgaggtgcggaaaccatcgaagaagttaacaaacgggatgcgtcccttaatcgccgccagatgcgccaccgccgacaaatccatcacctgctgcacgttgttctccgccagcatcgcgcagccggtctggcgaaccgccatcacgtcctggtgatcgccaaaaatattcagcgaattggtcgccagcgcccgggcgctgacgtgaaagacgcccggcagcagttcaccggcgattttgtacatgttggggatcatcagcagcagcccctgggaggccgtataggtggtggtgagcgccccggcctgcagcgcgccgtgtaccgcgcctgccgcgccggcttccgactgcatctccattaagcgcaccggctggccaaaaaggttctttttcccctgcgccgcccactcgtcgacgttttccgccatcggcgtggaaggggtaatggggtaaatcgccgcgacctcggtaaaggcataagagatccaggccgccgcggcgttgccatccattgttttcatttttccggacattgttcaatcctcgaaggtgagaggcatcttcgccgcctcgaataagcggcaaacccagttgttgcctcaagcacagcctgtgccagctcgcgggtgaccgaagagttagcgcgaattcaacgcgttatgaagataaaggcaacgcagcgcgccgagagattgcgtggaacaagacacaggggacgacaagctgttgaacagacgacaaaccgccacaatggccccggcaggcggaattgttctgtttcccacatttggtcgccttattgtgccgttttgttttacgccctgcgcggcaatgaattaataaattcataaaaatcagataaataaataaacaggcacggctggtatgttccctgcacttctctgctggcaaacactcaaccacaggagaagtcaccatgaccatgcgtcaatgcgctatttacggtaaaggcggtatcggcaaatccaccactacgcagaacctcgtcgccgcgctggcggagatgggtaagaaagtgatgatcgtcggctgcgatccgaaggcggactccacccgcctgatcctgcacgctaaagcacagaacaccattatggagatggccgcggaagtcggctcggtcgaggatctcgagctcgaagacgtgctgcaaattggctacggcgacgtgcgctgcgcggaatccggcggcccggagccaggcgtcggctgcgcggggcgcggcgtgatcacggcgatcaactttcttgaagaagaaggcgcctacgaggacgatctcgattttgtcttctatgacgtgctcggcgacgtggtctgcggcggcttcgccatgcctatccgtgaaaacaaagcccaggagatctacatcgtctgctccggcgaaatgatggcgatgtacgccgccaacaatatctccaaagggatcgttaaatacgctaaatccggcaaggtgcgcctcggcggcctgatctgtaactcacgccagaccgaccgtgaagacgaactgatcatggccctggcggaaaagctcgggacccagatgatccactttgtcccccgcgacaatatcgtgcagcgcgcggagatccgccgaatgacggtgatcgagtacgaccccgcctgccagcaggccaacgaataccgcaccctggcgcagaagatcgtcaacaacaccatgaaagtggtgccgacaccctgcaccatggatgaactggagtcgctgctgatggagttcggcatcatggaagaagaagacaccagcatcattggtaaaaccgccgccgaagaaagcgcggcctgagcacaggacaataatgatgaccaacgcaacgggcgaacgtaatctggcgctgatccaggaagtcctggaggtgttcccggaaaccgcgcgaaaagagcgcagaaagcacatgatggtcagcgatccgcaaatggagagcgtcggcaagtgcattatctctaaccgcaaatcacaacccggcgtgatgaccgtgcgcggctgcgcctacgccggctcgaaaggggtggtattcgggccaatcaaggatatggcccacatctcgcacgggccggtcggctgcggccagtattcccgcgccggacgacgcaactactacaccggggtcagcggcgtcgatagcttcggcacgctgaacttcacctctgattttcaggagcgcgacatcgtcttcggcggcgataaaaagctcagcaagctgattgaagagatggagctgctgttcccgctcaccaaagggatcaccatacagtcggaatgcccggtggggctgatcggcgatgatatcagcgcggtggccaacgccagcagcaaagcgctggataaaccggtgatcccggtacgctgcgaaggctttcgcggcgtgtcgcagtcgctagggcaccatatcgccaacgacgtggtgcgcgactggatccttaacaatcgcgaaggacagccgtttgaaaccaccccttacgatgtggcgatcatcggcgactacaacatcggcggcgacgcctgggcctcgcgcatcctgcttgaagagatggggctacgggtggtcgcgcagtggtccggcgacggcacgctggtggagatggagaacaccccattcgtcaagctgaacctggttcactgctaccgttcgatgaactatatcgcccgccatatggaggagaaacatcagattccgtggatggagtacaacttcttcgggccgaccaaaatcgccgaatcgctgcgcaaaatcgccgaccagtttgacgataccattcgcgcgaacgccgaagcggtgatcgcccggtatgaggggcagatggcggcgattatcgccaaatatcgcccgcgcctggaggggcgtaaggtgctgctctatatgggcggcctgcggccacgccacgtcatcggcgcctacgaggatctcggcatggagatcatcgccgccgggtacgagtttgcccataacgatgactacgaccgcaccctgccggatctcaaagagggcacgctgctgttcgatgacgccagcagctatgagctggaagcgttcgttaaggcgctgaagcccgaccttatcggctccggcatcaaggaaaaatatatcttccagaaaatgggcgtgccgttccgccagatgcactcgtgggactattccggcccgtaccacggctacgatggtttcgccattttcgcccgcgatatggatatgaccctgaacaacccggcgtggaacgaactcaccgcgccgtggctgaagtctgcgtgattgcccactcactgtcccgtctgttcaccgatttgtggcgcgggaggagaacaccatgagccaaacgattgataaaattaatagctgctatccgctattcgaacaggatgaataccaggagctgttccgcaataagcggcagctggaggaagcgcacgatgcccagcgcgtgcaggaggtctttacctggaccaccaccgccgagtatgaagcgctgaatttccagcgcgaggcgctgaccgttgacccggcgaaagcctgccagccgcttggcgcggtgctttgctcgctgggatttgccaataccctgccgtacgtccacggctcacaggggtgcgtggcctactttcgcacctattttaaccgccatttcaaagagccgatcgcctgcgtctccgactcgatgaccgaagacgcggcggtcttcggcggcaacaacaacatgaatctgggtctgcaaaacgccagcgcgctgtacaagccggagatcatcgcggtttccaccacctgcatggcggaagtcatcggcgatgacctgcaggcgtttatcgccaacgccaaaaaggatggcttcgtcgatagcagcatcgccgtgccccatgcccatacgccaagctttatcggcagccacgtcaccggctgggacaacatgtttgaaggcttcgccaaaaccttcaccgcggactaccaggggcagccgggcaaactgcagaagctcaatctggtgaccggctttgaaacctatctcggcaacttccgcgtattaaagcggatgatggaacagatggcggtgccgtgcagcctgctctccgatccgtcagaagttctcgacacgcccgccgacggccattatcggatgtattccggcggcaccacgcagcaggagatgaaagaggctcctgacgccatcgatacgctgcttctgcagccgtggcagctgctgaagagcaaaaaagtggtgcaggagatgtggaaccagcccgccaccgaggtcgcgattcctctggggctggccgctaccgatgaactgctgatgaccgtcagccagcttagcggcaagccgatcgccgacgccctcacccttgagcgcggccggctggttgacatgatgctcgattcccacacctggctgcacggcaagaaatttggcctgtacggcgacccggacttcgtgatgggcctcacccgcttcctgctggagctgggctgcgagccgacggtgatcctgagccataacgccaacaaacgctggcaaaaagcgatgaagaaaatgcttgatgcctcgccgtacgggcgcgatagcgaagtgtttatcaactgcgatttgtggcacttccgttcgctgatgttcacccgtcagccggactttatgatcggcaactcctacggcaagtttatccagcgcgataccctggcgaagggcaaagcctttgaagtaccgcttatccgcctcggctttccgctgttcgaccgccaccatctgcaccgccagacaacctggggttatgaaggggcgatgaacattgtgacgacgctggtaaacgccgtactggagaaactggatagcgataccagccagctgggcaaaaccgattacagtttcgatctcgtccgttaaccatcaggcgccccgcgtcacgcggggccaggagggagtatgcccatcgtgattttccgtgaacgcggcgcggacctgtacgcctatatcgcgaaacaggatctggaggcgcgagtgctgcagattgagcataacgacgctgaacgctggggcggcgcgatttcgctggaagggggacgccgctactacgtcaatccgcagccggggcgccccgcctttccgataagcctgcgcgcgacgcgcggcgcgttgatataaggagctggagatgtccgacaacgatacccttttctggcgcatgctggcgctgtttcagtccctgccggacctgcagccggcgcaaattgtcgactggctggcgcaggagtgcggcgagacgctgaccccggcgcggctggcgaccctggcccagccgcagctggccgccagcttcccctccgcgacggcggtgatgtcccccgctcgctggtcgcgggtgatggcgagcctgcagggcgcgctgcccatccatttacgcatcgttcgccctgcccagcgaacgccgcagctgctggcggcgttttgctcccaggatggcctgatgattaacggccatttcggccaggggcgactgttttttatctacgcgttcgatgagcaaggcggctggctgcacgatctgcgccgctatccctccgcgcccacccagcaggaagccagcgaagtgcgcgcccggctgattgaagactgccagctgctgttttgtcaggagatcggcgggcccgccgccgcccggctgatccgccaccggatccacccgatgaaagcgcagcccgggacgacgattcatgcccagtgcaaggcgatcaatacgctgctggccggccgtttgccgccgtggctggcgaagcggcttaaccaggagaaccctctggaggcgcgcgttttttaattcctgttttgtgcttgttgcccgctgaccccgcgggctttttttcgcgtatggacgctcttcccgcgtgagggtcaggcattattccgttcaggggaatattccgttcacggttgttccgggcttcttgatgcgcctaaccccctcgctgccagccttccagcaacaaatagccatgccagcgagataggccataaaggatcacttaccgccatcccttgtccgattgttggctttgtcgcaaagccaacaaccctttttctttaaatatcaaggcgccgcttatggagcgcgaattgcatcttccccctcatcccccaccgtcaacgaggtcactatgaagggaaatgaaattctggcgctgctggatgaaccggcctgtgaacacaaccataaacaaaaatccggctgcagcgcgcccaaacccggcgccaccgccggcggctgcgcgttcgacggcgcgcagataaccctgctgcccattgccgacgtggcgcatctggtccatggccccatcggctgcgccggaagctcctgggataaccgcggcagcgccagctccggccccaccctgaatcggctcgggttcaccaccgatctcaacgaacaggacgtgattatgggccgcggcgaacgtcgcctgtttcacgccgttcgccatatcgtcgcccgctatcacccggcggcggtctttatctacaacacctgcgtaccggccatggagggcgatgacctggaagcggtatgccaggccgcgcagaccgccaccggcgtaccggttatcgccatggacgccgccggtttttacggcagtaaaaatctcggtaaccggctggccggcgaggtcatggtgaaacgggtaatcggtcagcgcgagcccgcgccctggccggagagcacgccctttgccccggagcagcgtcacgatattggcctgattggcgaattcaatattgccggcgagttctggcatattcagccgctgctcgacgaactggggatccgcgtgctcggcagcctctccggcgatggccgtttcgccgagatccagaccatgcatcgggcgcaggccaatatgctggtctgctcgcgggcgctaattaacgtcgccagagccctggagcagcgctacggcacgccgtggttcgaaggcagcttctacgggatccgcgccacctccgacgccctgcgtcagctggcggcgctgctggacgatgacgaccttagccagcgcaccgaagcgctgattgcgcgggaggaacagacggcggaactggcgctacaaccgtggcgcgaacggctgcgcggccgcaaagcgctgctctataccggcggggtgaaatcctggtcggtggtctcggcgcttcaggatttgggcatgaccgtggtggcaaccggcacgcgtaaatccaccgaagaggataaacagcggatccgcgagctgatgggcgaagaggcggtaatgctggaagaaggcaacgcccgcacgctgctggatgtggtctatcgctatcaggccgacctgatgattgccggcggacgcaatatgtacaccgcctataaagccaggctgccgtttctcgatatcaatcaggagcgcgaacacgccttcgccggctacaaggggatcgtcaccctcgcccgccagctgtgtcagaccatcgacagtcccatctggccgcaaacccatgcccgcgccccgtggcactaaggagttcaccatggcagacattttccgcaccgataaaccgctggcggtcagcccgatcaagaccggccagccgctcggcgcaatcctcgccagcctcgggattgaacacagcatccctctggtccacggcgcgcagggatgcagcgccttcgccaaagtcttttttattcaacacttccacgacccggttcccctgcagtcgacggcgatggaccccacgtcgacgattatgggcgcggacggcaatattttcaccgccctggacaccctctgccagcgcaacgcgccgcaggctatcgtgctgctcagcaccgggctgtctgaggctcagggcagcgacatttcccgcgtggttcgccagtttcgcgaagagtatccccggcacaagggcgtggcgatattaaccgttaacacgccggatttttatggttccatggaaaacggcttcagcgcggtgctcgagagcgtcattgagcagtgggttgcgccgacgccgcgcccggctcagcgcaatcgccgggtcaacctgctggtcagccacctctgctcgccgggcgatatcgagtggctgcgccgatgcgtcgaagcctttggtctgcagccgataatcctgccggacctggcgcaatcgatggatgggcacctggcgcagggcgatttctcgccgctgacccagggcgggacgccgctgcgccagatagaacagatgggacaaagcctgtgcagcttcgccattggcgtctccctccaccgcgcgtcatcgctgctggccccgcgctgccggggcgaggttatcgccctgccgcacctgatgaccctcgatcgctgcgacgcttttattcatcaactggcgaaaatttccggacgcgccgttcccgcgtggctggagcgccagcgcggccagctgcaggatgcgatgatcgactgtcatatgtggcttcagggccagcgcatggcgatagcggcggaaggcgatctgctggcggcgtggtgtgatttcgccaacagccaggggatgcagcccggcccgctggtggctcctaccggccatcccagcctgcgccagctgccggtggaacgcgtggtgccgggagatctggaggatctgcaaacgctgctgtgcgcccaacccgccgacctgctggtggccaactcccacgcctgcgacctggcggagcagtttgcgctgccgctggtacgcgcgggttttccgatctttgacaagctcggtgaattccgccgggtgcgtcaggggtactgcggaatgcgcgatacgctgttcgagctggcaaacctgatgcgcgagcgccatcaccacctcgcccgctaccgatcgccgcttcgccagaacaccgaatcttcactctccacaggaggcgcctatgccgccgattaaccgtcagtttgatatggtccactccgatgagtggtctatgaaggtcgccttcgccagttccgactatcgtcatgtcgatcagcattttggcgccacgccgcggctggtggtatacggcgtcaaggcggatcgggtcaccctgatccgggtggttgatttctccgttgagaacggccaccagacggagaagatcgccaggcggatccacgcccttgaggattgcgtcacgctgttctgcgtggcgattggcgacgcggtttttcgtcagctgttgcaggtcggcgtccgcgccgaacgcgttcccgccgataccaccatcgtcggcttactgcaggagatccagctttactggtacgacaaagggcagcgcaaaaatgcgcgccagcgcgacccggagcgctttacccgtctgctgcaggaacaggagtggcatgaggaaccggacccgcgccgctagccgtgtcgtttgtgtgacaaagcccacaaaacatcccgacactgtcgggcgcgtcttgtcagggaaaaatataacaaattgaaaatattgcattttattctctggtatcgcatttgctagttcgttaacgccaccgcactcctgcggtgaaccgcgccccggcgttttccgtcatcatccctggagctgacagcatgtggaattactccgagaaagtgaaagaccatttttttaatccccgcaacgcgcgcgtggtggacaacgccaacgcggtaggcgatgtggggtcattaagctgcggcgacgcgctgcgcctgatgctgcgcgttgacccgcaaagcgaaattatccaggaagcgggcttccagaccttcggctgcggtagcgccatcgcctcctcctccgcgctgacggagctgattatcggccataccctggccgaagccgggcagataaccaatcagcagattgccgattatctcgacgggctaccgccggagaaaatgcactgctcggtgatgggccaggaggccctgcgcgcggccatcgccaactttcgcggcgaaagcctggaggaggagcatgaggagggcaagctgatctgcaaatgcttcggcgtcgatgaaggacacattcgccgcgcggtgcagaacaacggcctgaccacccttgaagaggtgatcaactacaccaaagcgggcggcggctgcaccgcctgccacgaaaaaatcgagctggcgctggcggagatcctcgcgcagccgccgcagacgccgcccgctgcggccagcggcaaagatccgcactggcagagcgtcgtcgagaccatcgctgaactgcgcccgcatattcaggccgacggcggcgatatgtcgctgctcagcgtcgccaaccaccaggtgaccgtcagcctctccggcagctgtagcggctgcatgatgaccgatatgaccctggcctggctgcagcaaaaactgatggaacgtaccggctgttatatggaagtggtggcggcctgagccgcggttaactgaccctagggggacaagatgaaacaggtttatctcgataacaacgccaccacccgtctggacccaatggttctggaagcgatgatgccctttttgaccgacttttacggcaacccctcgtcgatacacgattttggcctaccggcccaggcggctctggagcgcgcgcatcaacagaccgcggcgctgctgggcgcggagtatcccagcgagatcatctttacctcctgcgccaccgaagccaccgccaccgccatcgcctcggccatcgccctgctgccggagcggcgcgaaattatcaccagcgcggtcgaacatccggcgacgctggcggcctgcgagcacctggagcgccagggctacctgatccatcgcatcgcggtggatagcgagggggcgctggacatggcgcagttccgcgccgcgctcagcccgcgcgtcgcgctggtcagcgtgatgtgggcgaataacgaaaccggggtgcttttcccgatcgccgaaatggcggagctggcccatgaacaaggggcgctgtttcactgcgatgcggtacaggtggtgggcaaaatgccgattgccgtgggcgagacccgcatcgacatgctctcctgctcggcgcataagtttcacggaccaaaaggcgtaggctgcctctatctgcgccggggaacgcgctttcgcccgctgctgcgcggcggtcatcaggagtacggtcggcgcgccgggacggaaaatatctgcggaatcgtcggcatgggcgcggcctgcgagctggcgaatattcatctgccgggaatggcgcatatcggccagctgcgcgacaggctggagcatcgcctgctggccagcgtgccgtcggtcatggtgatgggcggtagccagccgcgggtgcccggcacggcgaatctggcctttgagtttattgagggtgaggccattctgctgctgctcaaccaggccgggatcgccgcctccagcggcagcgcctgcacgtcaggctcgctggaaccctcccacgtgatgcgggcgatgaatatcccctataccgccgcccacggcaccatccgcttttccctctcgcgctacacccgggagaaagagatcgattacgtcgtcaccgcgctgccgccgattatcgaccggctgcgcgcgctgtcgccctactggcacaacggcaagccgcgcccggcggacgccgtcttcacgccggtttacggctaaggcggaggtggctgatgggacgcgtgctgattaacgataccaccctccgcgacggcgaacagagccccggcgtcgcctttcgcaccagcgaaaaggtcgccattgccgaggcgctttatgccgcagggattacggcgatggaggtcggcaccccggcgatgggggacgaggagatcgcgcggatccagctggtgcgtcgccagctgcccgacgcgacgctgatgacctggtgccggatgaacgcgctggaaatccgccagagcgccgatctgggcgttgactgggtgaatatttcgattccggcttcagataagctgcggcagtacaaactacgcgagccgctaacggtgctgctggagcggctggcgatgtttatccgccttgcgcatacgctcggtctgcgggtatgcatcggctgcgaggacgcctcgcgcgccggcgtccaggccctgcgcgctatcgccgaggtcgcgcagcagtgcggcgccgcccgcctgcgctatgccgatacggtcggcctgctcgaccccctcactaccgcggcgcaaatctcggccctgcgcgaagtctggtccggggaaatcgaaatgcacgcccacaacgacctgggtatggccaccgccaatacgctggcggcggtaagcgccggggccaccagcgtgaatacgacgatcctcggcctcggcgagcgggcgggcaacgcggcgctggaaaccgtcgcgctgggcctggagcgctgcctcggcgtgaagaccggcgtgcattttccggcgctgcccgcgctctgtcagagggtcgccgaagccgcccagcgcgccatcgacccgcagcagccgctggtcggcgagctggtgtttacccatgaatcaggggtccacgtggcggcgctgctgcgcgacagcgagagctatcagtcgatcgccccttccctgatgggccgcagctaccggctggtgctgggtaaacactccgggcgtcaggcggtcaacggcgtatttgaccagatgggctatcaccttaacgccgcgcaaattaaccagctgctgcccgccatccgccgcttcgccgagaactggaagcgcagcccgaaagattatgagctggtggctatctacgacgagctgtgcggtgaatccgccctgcgggcgagggggtaatgatggagtggttttatcaaattcccggcgtggacgaacttcgctccgccgaatcctttttccagtttttcgccgtcccctaccagcccgagctgcttggccgctgctgcctgccggtgctggcaacctttcaccgcaaactgcgcgccgaggtgccgctgcaaaaccggctggaggaaaacgcccgcgctcactggctgctggcgcgacgactgctcgcggagagctatcagcaacagtttcaggagagcggaacatgagaccaaaattcacctttagcgaagaggtccgcgtcgtacgcgcgattcgtaacgacggcaccgtggcgggcttcgcccccggcgcgctgctggtcaggcgcggcagcaccggctttgtgcgcgactggggcgtttttttgcaggatcaaattatctaccagatccactttccggaaaccgatcggatcatcggctgccgcgaacaggagctgatccccatcacccagccgtggctggccggaaacttgcaatacggtgataacgtcgcctgccggatggcgcttgcggtcaacggcgatgtggtcgtgagcgccggccagcggggacgcatcgaggcgaccgatcgcggagagaccggcgacagctacaccgtggactttagcggccgctggttcagggttccggcgcgggccatcacccttatagaggagagagaagaatgaacgcatggcaacgttttgcccggcagcggctggcgcgcagccgctggaatagcgaccccacggccctggagccggccgatacgccggcttttgaacaggcctggcaacgtcagtgccgcatggagcaggcgatcgtcgcgcgggtcccggaaagcgatattccggcggcgctgctggagaatatcgccgcctcccttgccgtctggctcgacgagggggaatttacgccgccggagcgcgcagccatcgtgctgcatcacgcccgactggaggtcggctttaccgatatcgcccgccaggcgccgcagccggatctctccacggtgcaggcctggtacctgcgccaccagacgcagtttatgcgcccggagcagcgtctgacccgccacctgctgctgacggtcgatggcgaccgcgaagccgtacaccagcggatcctcggcctgtatcggcaaatcaacgcctcccgggacgcgtttgctccgctggctcgccgccattcccactgcccaagcgccctggaagagggccgtctgggctggattagccgcgggctgctctatccccagcttgagacggcgctgttttcactggcggaaaacgccctgagcctccccgtcgccagcgagctggggtggcatcttttatggtgtgaagcaattcgtcccgccgcgcccatggagccgcagcaggcgctggagagcgcgcgagattatctttggcagcagagccagcagcgccatcagcgccagtggctggaacaaacgatttcccgtcagccgggcctgtgcgggtagcctcgcggctacccgttaacgcctacagcaccgcgcgtttaatctcctcaagccagctcgccagacgcgcttcggtctggtcgaactggttatcctgatccagcaccagcccaataaagcgttcgccttccagcgccgcagaggcgctgaattcatagccctcatttggccagctgccgattatctgcgcgccgcgcgcgcgcagagcgtcgtacagcggacgcatcccgctaacgaagttgtccgggtagcctttctggtcgccgaggccgaacagcgccacggttttcccgctcaggctggcgtcgtcgaggtcgctaatgaattcgctccatgattcgccttcgcatccggcctcaagccccggcagctggccgtcgccgagcgtcggcgtgcccagcagcagcaccggataggccataaagtcgtccagcgtcgtgcggttaatgttgaccggggcatccgccagctcgcccagctgtttgtggatcattttcgcgattttgcgggttttaccggtatcggtgccaaagaaaataccaatgttcgccatattgcgctcctgtcggaaagggggttgaaaacacgcgttctcgcagaggtattgcgaaggctgtgccaggtttctttgcactatcgcggctcacccctgccccaaaacgatcgcttccgcgcccgcccgccgcccgcagcggggccggcgggccgcttaaaatgaaaaaagcgctgggttttcccctaccggatcaatgtttctgcttatctcgccgataagggcgcacgctttgcatggttatcgaaattcgacaaacgccgcggcgttctcgtcacggtgtcggacaaattgtcataactgcgacacaggagtttgcgatgaccctgaatatgatgctcgataacgccgtacccgaggcgattgccggtgcgctgactcaacaacatccggggctattttttacgatggtcgaacaggcatcggtagccatttccctcaccgatgcccgggcgaatattatctacgccaacccggcgttttgccgccagagcggatattcgctggcgcaactgctcaatcaaaacccgcgcctgctggccagcagccagacgccgcgagaaatctaccagcagatgtggcaaaccctgcttcagcgccagccgtggcgcggccagctgattaatcagcgccgcgacggcggcctgtatctggtggatatcgacatcacgccggtgctgaatccccagggcgagctggagcattatctggcgatgcagcgggatatcagcgtcagctataccctggaacagcggctgcgcaatcatatgacgctgatggaggcggtgctcaacaacatccccgccgccgtggtcgtggtggatgagcaggatcgggtggtgatggataatctcgcctacaaaacgtactgtgcggactgcggtggaaaagagctgctggtcgagctccagatttcaccgcgcaaaatggggcccggcgcggagcaaatcctgccggtggtggttcgcggcgcggtccgctggctgtcggtgacctgctgggcgctgcccggcgtaagcgaagaagccagccgctattttgtcgacagcgccccggcgcgcacgctggtggtgatcgccgactgcacccagcagcgccagcagcaggagcagggccgtctcgaccgtctgaagcagcagatgaccgccggaaagctgctggccgccattcgcgagtcgctggacgcggcgctgattcagcttaattgcccgatcaatatgctggcggcggcccgtcggctgaacggcgaaggcagcggcaacgtggcgctggacgcggcgtggcgcgaaggcgaagaggccatggcgcgactgcagcgctgccgcccttctctcgagctggaaagcagcgccgtctggccgcttcagcccttctttgacgacctgtacgccctctaccgcacccgctttgacgaccgcgcgcggctgcgggttgacatggcatcgccgcatctggtcggcttcggccagcgtacccagatgctggcctgcttaagtttatggctcgatcggacgctggccctcgccgctgaactgccctccgtaccgctggagatcgagctttatgccgaagaggacgagggctggctctcgctgtatctcaacgacaatgtaccgctgctgcaggtgcgctacgcccactcacccgatgccttaaactctcccggcaaagggatggagctgcggctgatccaaacgctggtcgcctaccaccgcggcgcgattgaactggcttcgcgcccgcagggaggcaccagcctcgttctgcgattcccgctctttgataccctgaccggaggtgagcaatgatccataaatccgattcggacaccaccgtcaggcgcttcgatctctcccagcagtttaccgccatgcagcggataagcgtggtgctgagccgcgccaccgaagcgagcaaaaccctgcaggaggtgctgagcgttttacataacgatgcgtttatgcagcacgggatgatttgcctgtacgacagccagcaggagatcctgagcatcgaggcgctgcagcaaacggaaaaccagacgctgcccggcagtacgcaaattcgctaccggccgggagaaggactggtcggtaccgtgctggcgcagggccagtcgctggtgctgccgcgcgtcgccgatgaccagcgctttctcgatcgtctgagcctgtacgactacgacctgccgtttatcgccgttccgctgatgggcccccattcccggcccatcggcgtactggcggcgcagccgatggcgcgtcaggaagagcggctacccgcctgcacgcgctttctcgaaaccgtcgccaatctggtggcccagacgattcgcctgatgattctgccgacctccgccccgcagccgccgcagcagagcccccgagttgagcgcccgcgcgcctgtaccccttcacgcggtttcggcctggagaatatggtcggcaaaagcccggcgatgcggcagattatggacattatccgtcaggtctcccgctgggataccacggtgctggtgcgcggcgagagcggcaccgggaaagagctgatcgccaacgccattcatcataattccccgcgcgccgccgccgcattcgtcaaatttaactgcgcggcactgccggacaatctgctggagagcgagctgttcggccatgagaaaggcgcgtttaccggcgcggtgcgccagcggaaaggccgctttgagctggcggacggcggcaccctattcctggatgaaatcggtgaaagcagcgcctcgtttcaggccaagctgctgcgaattctgcaagaaggagagatggagcgcgtcggcggcgatgaaaccctgcgcgtcaacgtacgcatcatcgcggcgaccaaccgccatctggaagaggaggtgcggctggggcatttccgcgaagacctttactaccgcctgaacgtaatgcctatcgcgctgccgccgctgcgcgagcgccaggaggatatcgccgaactggcgcattttctggtacgtaaaatcgcccacagccaggggcgaacgctgcgcatcagcgatggggcaattcgcctgctgatggagtacagctggccgggaaacgtccgcgaactggaaaactgtctcgaacgttcggcggtgatgtcggaaagcggcctgatcgaccgggacgtgattctgttcaaccatcgcgataacccgccgaaagcgctacccaacggcggccagactgaagacggctggctcgacaacagcctcgacgagcgccagcggctgattgccgccctggagaaggcgggctgggtgcaggccaaagcggcgcggctgctcgggatgacgccgcgtcaggtagcgtatcgcattcagatcatggatatcaccatgccgcggctgtgaagcgttatgtgagattcaggacattgtcgccagcgcggcggaattgcgacaattttacctggccggccgtcagttaaagcgtttatttttcatatggttgtaaaaatcccctctggtatagcatttgcagcaggaaggtatcgcccaaccacgaaggtatgaccatgacttcctgctcctctttttctggcggcccagcctgccgcccggcggatgacagcgccctgacgccgcttgtggccgataaagctgccgcgcacccctgctactctcgtaatgggcatcaccgttttgcgcgaatgcatctgcccgtcgcgcccgcctgcaatttgcagtgcaattactgtaatcgcaaattcgattgcagcaatgagtcccgccccggcgtatcgtcaacgctgctcacgcctgaacaggcggtcgtcaaagtgcgtcaggtcgcacaggcgatcccgcagctttcggtggtcggcatcgccggccccggcgatccgctcgccaatattgcccgcaccttccgtaccctggagctgatccgcgaacagctgccggacctgaagttatgcctgtcgaccaacgggctgatgctgcctgacgccgtggatcgcctgctggacgtcggggttgaccacgtcacggtcaccattaataccctcgacgcggagattgccgcgcaaatctacgcctggctatggctggacggcgagcgctacagcggacgcgaagcgggagagattctgattgctcgtcagctggagggcgtgcgcaggctgaccgcccagggcgtgctggtgaaaataaattcggtgctgatccccggcatcaacgatagcggcatggccgacgtgagccgcgcgctgcgggccagcggcgcgtttatccataatattatgccgctgatcgccaggccggagcacggcacggtgtttggcctcaacggccagccggagccggacgcagagacgctcgccgccacccgcagccggtgcggagaagtgatgccgcagatgacccactgccaccagtgccgcgccgacgccatcgggatgcttggcgaagaccgcagccagcagtttacccagcttccggccccggagagcctcccggcctggctgccaatcctccaccagcgcgcgcagctgcacgccagcattgccacccgcggcgaatctgaagccgatgacgcctgcctggtcgccgtggcgtcaagccgcggggacgtgattgattgccactttggccacaccgaccggttctctatctacagtctctcggccgccggcatggtgctggtcaacgaacggtttacgcctaaatattgtcaggggcgcgaagagtgcgagccgcaggataacgcggcccggttcgcggcgatcctcgaactgctggcggacgttaaagccgtattctgcgtgcgtatcggccatacgccgtggcaaatgctggaacaggaaggcattgaaccgtgcgttgacggcgcgtggcggccggtctccgaagtgctgcccgcgtggtggcagcagcgccgggggagctggcctgccgcgctaccgcataagggggtcgcctgatgccgccgctcgactggctgcggcgcttatggctactgtaccacgcggggaaaggcagctttccgctgcgcatggggcttagcccgcgcgactggcaggcgctgcggcgacgcctgggcgaggcggagacgccgctggacggcgaggcgctaacccgccgccgcctgatgagcgaactcaacgctacccgcgaagaggagcgccagcagctgggcgcgtggctggcgggctggatgcagcaggaggccgggccgatggcgcagattatcgccgaggtttcgctggcgtttaaccatctctggcaggatctgggccttgcgtcgcgcgccgaactgcgcctgctgatgatcgactgctttccgcagctggtggcgatgaacgaacacaatatgcgctggaaaaagttcttttaccgtcagcgctgtttgctccagcagggggaagttatctgccggtcgccaagctgcgacgagtgccgggagcgcagcgcctgctttgagtagcggttacccgagctcctgcccggcctgcggaacgccagaaacaaaaaagccggaggtctccctccggcttttcacatcaccaaacgcgatcaggcaacgtcttcgtactgcggtaccgggttgcggaagcttttggtcacgcaggccaggtagaccagaccaataccgccccagatcaggccgagaaccatggagctctcttccagattgatccacagtgcgccaacggtcagcgcgccgcacaccggcagaaccagatagttgaagtggtctttcagcgttttgttgcgcttttcacggatccagaactgggagatcaccgacaggttaacgaaggtgaacgccaccagcgcgccgaagttaatcagcgccgtcgccgtgacgaggtcgaatttaatcgccagcagcgcaatcgcgccaaccagcagtacgttccacgccggagtccgccatttcggatgcacgtagccgaagaagcgcgtcgggaacacgccgtcgcggcccatcacgtacatcagacgggaaacgcccgcgtgcgcggccatgccggacgccagtacggtgacgctggagaaaatcagcacgccccactggaaggttttgcccgccacgtacagcatgatttcaggctgcgatgcgtccggatccttaaagcgcgagatatccgggaagtacagctgcaggaagtaggaagcgccgataaagatcaggccgccaatcagcgcggtcaggaagatagccttcgggatcacgcgctctgcgtctttggtctcttcagacagcgaagagataccgtcgaagccgaggaacgagaagcacaggatggtcgcgccggtaatcatcggcaccacgtgcgcgccttcagaccagaacggacgggtgctggtcagcgtgcccgcgccttcgccgtgcataacgccgtagataatcaggccaacaatcaccgccacgatgcccatctgcaggataacgattagggtgttgaagttcgccacggtcttgatgctgcgcaggttggagatggtcataaaggccaccagcgcgacaacgaagatccacgatggaatagaaggcaccagcgcttcaaagtaaattttcgccagcagaatgttgatcatcggcatgaacaggtagtccagcagcgatgaccagccaaccataaagccaacggccgggctaatggatttctgcgcgtaggtataagcggaacccgccgaagggaaacggcgaaccagtttaccgtagctcagcgccgtgaaaagaatggcgatcagcgcgaaggcgtaagccgtcgcaacgtgaccatcagtcaatccagagacgataccaaacgtatcgaacagcgtcatcggctgcatataggccaggcccatcatgacaaccggaatcaacgtaagcgttttacgtaattccacgcgagaggtttttggagtagcgttatgcgacatagttatccccttttacggtgaacgccagcgcgtaagcaaaaaattgccccatttctttgtattcctcagcgacaaccactgtcggtttttagtaaatatctatccggtacgaagcccggcctcttggtattgaatgatgtgtctttcaaccaaaaaaataaccgacactttaaaaaagcgtcggccagtttctgattttcaggacgcgtattttgcaacaactactggcacgatgacaagatgttacaaggcttaataattacggcgattctctaacagattaatattcatacgattttagtattatagacctgatggatagcactatttgctaatatctcctttcgccaccactcgcccgcctggccgcaaatatcttcattccagcctatccacgcgcgattgaccggttcaggcaccgtcgtttttaatatttgtagctcgccgcgggcgatgaaaggctgtacctgaaatagcggcaaatagccccatcccagtccggcgcacagcagcgtcagccgggcggaaagatcgaataccgccaggctatcctgagcgtcaatctgcggccacgcgccgtcggctacaatcgcccgatgacggcgcaacgtccgccagcccagcgggccggcaatctgcgcaagcggatgccggggcgcaacaacaaacgcctgcgccacctctcccagcagaacagagccgcagccgctgagcgccggcgggtcgcccagcacgccgagcagaagatccgcccgcccttccatcagcatctgccagtttgcgccaggggtatcgcggcggaattcaaggcgggtggcgtgatgctggtgataaaacgccgcgatcgcgggagccagcagcgggaacggaaaggtggcgtcgacgttgagtatcagcgcattttcccagccctgctgcagcctgacggcctgcttttccagttctcgggcggtgtgcagcacgtcgcgccccttttccagcagcatctgcccggtacgggtaaagcgcgcccggtggccgctgcggtcaagcagttgaatattgagatcgctttccagcttatgaatggtgtagctcagcgccgacggcgttttatagagcttcgccgaggcggcggcaaaactgccctctttgtcgagggcatcaagaatgacgagcacatccagcagtggtttcatcgctacccccttacggtacgcgattcaccgctggcgcattactccatcggcatgaccagcgggtcggggtactggtactcaaaccccagttcgttgcaaatacggctgccatctacgatcttaccgctaccgttctccgggttatcagagaatacggggacgggaagcccaagctcgcgggccatctgcggataaaagacgccgcgcgcgggatgcttaggcgcacatatattatagatgcgcccgcctttcggagcctgcagtaacagttcgatcgcggcaatcacatcctgaagatgcaccagattgacgccgtgctggccgtccggcgcggattttccggcaaaaaagcgccccggatgacgggacggccccaccagcccggcgaggcgcagaatgtccaccgaggtgccgggaagattatgcagccagtcctccagctctttcagcacccgcccgctggcggtttgcgggttgcggggcgagttctctttcagcgtgccgctggcgttgccgtaaaccgacgttgagctggtgaatatgatgcgcggcacgtgatgcgccagcgcggtatcgacgatctcctgtaccgcctgaagataaaagtcctctcccggtccggttcgccgcgccggtaaggtaatgaccagcgcgtcaacgttcattaaggcatccagatcttcggcgtcgcagaccagctgcggctccagacgcagcggatagccgtcgatgccgcacatccgcgccgcctcgacgccatcctgcgtggtcttactgccggtcacctgccatccccgcgacatcaacgacagcgcaagcggcatacccagccatcctaaacctacaattgcgacctttttcatccccttgctcctgaattttcgctgtgctgacttaaggctacgccagccggcggcagctgacaatttctaaggtcaatatgaaatcaattaatgatagaaaaaagtccttgctttatgcgagtgaagtggtttaggttaaaaggcatcaaatgcatagtcattcacagagaattttatgaacagcgttcaatttaaaaaccaccatcatcaccatcatcctgactagtctttcaggcgatgtgtgctggaagacgtttggatcttccagtggtgcatgaacgcaaagagagcccccggaagattcacttccgggggcttttttttggaccgaattcggacagattcagacagggttacagaggaaaataagaatgttagacaacagccgtttacgcatagctattcagaaatcagggcgtttaagcgaagattcacgcgaattactcagccgctgcggcatcaaagtgaatctgcacacccagcgcctgatcgcgctggcggaaaatatgcccatcgatattctgcgcgtgcgtgatgacgatattccgggccttatcatggacggcgtggtcgatttggggattatcggcgaaaacgtgctggaggaagagctgctgagccgccgcgctcagggcgaagacccgcgctacttcaccctgcgccgtctcgacttcggcggctgccgcctgtcgctggcgaccccggcggatgaaccctgggacggcccggcagcgctggacggcaaacgcatcgccacctcctacccgcacctgctgaagcgctaccttgaccagaaagggatctcgttcaaatcctgcctgctgaacggctcggttgaagtggccccgcgcgccggtctggccgacgcgatttgcgacctggtatcaaccggcgcgactctcgaagcaaacggcctgcgcgaagtggaagtgatgttccgctccaaagcctgcctgatccagcgcgacggcgagatggccgatagcaaacagcagctgatcgaccgcctgctgacccgtattcagggagtgattcaggcccgcgaatcaaaatacatcatgatgcacgcgccgaccgagcgcctggaagaagtggtcgccctgctgcccggcgccgagcgcccgaccattctgccgctggcgggtgacaagcagcgcgtggcgatgcacatggtgagcagcgaaaccctgttctgggaaaccatggaaaaactgaaagcgctgggcgccagctccattctggtcctgccgattgagaagatgatggagtaaaccggcgggtcggtcacgggataaacaggggaaacaaccatgagcttcaacacaattatctactggaacggctgtagcgcagaacaacagcaacagctcttaacgcgcccggccatttccgcctccgagagcatcagcaagacggtgtcggagatcctgaataacgttaaagacaacggcgatgcggccctgcgcgaatacggcgcgaagttcgataaaaccgacgtcaaggcgctgaaggtcagcgatgaagagattgccgccgccggcgcgcgcctgagcgacgagctcaagcaggcgatggccgtggcggtcaaaaatatcgaaaccttccacaacgcgcagcggctgcaggccgtcgatgtggaaaccctgccgggcgtacgctgccagcaggtgacccgccctatcgcctccgtcggcttatatattcccggcggctcggcgccgctgttctccacggtgctgatgctcgccacgccggcgcgcatcgcgggctgccagcaggtggtgctgtgttcgccgccgccgattgccgatgaaatcctctatgccgcccagctgtgcggcgtgcgcaatatctttaacgtcggcggcgcgcaggcgattgccgccctggcgttcggcaccgaatcggtagcgaaggtcgataaaatctttggcccgggcaacgccttcgtgaccgaagccaagcgccaggtcagccagcgtcttgacggcgcggctatcgatatgcccgccgggccgtcggaagtgctggtgatcgccgacagcggtgccaccccggatttcgtcgcctctgacctgctttcccaggcggagcacggcccggattcgcaggtgatcctgctgacgccggatagcgagatggccacccgcgtcgcgcaagccgttgagcgccagctggccgcgctatcccgtgcggaaacggcccgcggggcgctctccgccagccgcatcatcgtggcgcgcgatatcgcccagtgcgtggagatttccaaccagtacggtcccgagcacctgattattcagacccgcaacgcccgcgaactggtcgacggcattaccagcgccggttcggtatttctcggcgactggtcgccggaatccgccggcgattacgcctccggcaccaaccacgtgctgccgacctacggctacaccgccacctgctccagcctcggcctggcggattttcagaaacgtatgaccgtgcaggagctgtcgcgcgacgggtttgccgccctcgcctcaacgattgagattctggccgccgccgagcgtctggacgcccacaaaaacgccgttacgctgcgcgtcgcagcccttaaggagcaagcatgagcatcgaagatttagcccgcgccaacgtccgcgcgctgacgccgtatcaatctgctcgccgtctgggcggtaaaggcgacgtctggctgaacgccaacgaattcccgaccgcggtcgcgtttcagctgaccgagcagacgatgaaccgctatccggaaccgcagccgaaagcggtcattgaacgctacgcgcagtatgcgggcgtcaagccggagcaggtgctggtcagccgcggcgccgatgaaggcattgaactgctgatccgcgccttctgcgagccgggccaggacgcggtgctctactgtccgccgacctacggcatgtacagcgtcagcgccgaaaccatcggcgtgacctgccgtacggtgcccaccctcgccgactggcagctggatctgccgggtatcgcggccaatcttgacggcgtgaaagtggtgttcgtctgcagcccgaataacccgaccgggcagattatcaacccgaaagattttcgcaccctgctggagatggcgcgcggtaaagccatcgtggtcgcggatgaggcctatattgagttctgcccgcaggccacgctggcgacctggctcaacgagtatccgcacctggtgattctgcgtaccctctccaaggccttcgccctggccggactgcgctgcggctttaccctcgccaacgccgaggtgattaacgtgttgatgaaggttatcgcaccttatccgctctcgacgccggtcgccgacatcgccgcccaggcgctcagcgcggaaggcattgccgccatgcgggcgcgcgtggcgcagatcctcggcgaacgcgattatctggtcagccagctgcgcagcattgcctgtgttgaagaggtgttcgattccgagagcaactacgttctggcgcggatcaccgcctccagcgcggtatttaaatctttgtgggatcagggcattatcttacgtgaccagaataaacaaccttcattaagcggctgtttgcgtatcactatcggtacccgtgcagagagccagcgcgtcattgacgctttgactgcggagaatgtatgacccagaagtttctctttattgaccgtgacggtacgctgatttccgagccaccggttgattttcaggtagaccgcttcgataagctggcgtttgagccgcaggtgatcccggccctgctgaagctgcagcaggaagggtacaagctggtgatgatcaccaatcaggacgggctgggaaccgccagcctgccgcaggacgagttcgacggcccgcacaacctgatgatgcagatcttctcctcacagggcgtcaactttgacgaggtgctgatttgcccgcatctcccggcggataactgcgactgccgcaagccgaaaaccaaactggtgctaccgtggctggagcaaggggtgatggacaccgccaacagctacgtgattggcgaccgcgcgaccgatatccagctggcggataacatgggcattaccggcctgcgctatgaccgcgaaaagctggactggccaaccatttgtgaacagctaacccgccgcgaccgctacgcccacgttgagcgcatcaccaaagagacccaggtggatgtgaaagtgtggctggaccgcgaaggcggcagcaaaatctccaccggcgtcggcttcttcgatcatatgcttgaccaaatcgccacccacggcggcttccgcctggagattaacgtcggcggcgatctttatatcgacgatcaccacaccgtggaagatactgggcttgcgctgggcgaagcgctgaagctggccctcggcgacaaacgcggtatcggccgtttcggctttgtgctgccgatggacgaatgcctggcccgctgcgcgctggatatctccggccgtccgcacctcgaatacaaagccgactttacctatcagcgcgttggcgatctgagcaccgagatggtggaacacttcttccgctcgctctcctataccatggcgatcactctgcacctgaaaaccaagggcaaaaacgaccaccaccgcgtagagagcctgtttaaggccttcggccgcacgctacgccaggcgattcgcgtccagggcgacacgctgccgtcttcgaaaggggtactctgatgaacgtggtgatcctcgataccggctgcgccaacctcaattcggtgaaatccgcggtgagccgccacggctacgagccacaggtcagccgcgacccggatgtggtgctacgcgccgataaactgtttctgccgggagtgggcacggctcaggcggcgatggaccagctgcgcgagcgcgatttgatcgaactgattaaagcctgtacccagccggtgctgggcatttgcctcggtatgcagctgctgggaaaacgcagcgaggagaataacggcgttgacctgctgggcattatcgaccaggacgtgccgaaaatgaccgaccacggcctgccgctgccgcatatgggctggaaccgggtatacgccaaagcgggcgatcgtctgtttcgcggcattgaagacggggcatatttttacttcgtccacagctacgcgatgccggtcaacgtcaataccatcgcccagtgcagctacggcgaggccttcaccgcggcggtgcagaaagataacttctttggcgtccagttccaccctgaacgctccggcagcgccggggcgcagctgctgaaaaacttcctggagatgtgatgatcattcctgctttagatttaattgacggcacggtcgtccgcctccatcagggcgattacggtcagcagcgcgactacggtaacgacccgctgccgcgcctgcaatcctatgccgcccagggggccgaagtgctgcacctggtcgacctgaccggggcgaaagatccggcgaagcgccagatcccgctgctgaaaaccctggttgccggcgtgaacgtgccggtgcaggttggcggcggcgtgcggacggaagaagacgtggccgccctgcttgatgcaggcgtggcgcgcgtggtggtgggttcaacggcggtgaagtcgccggaagtggtgaaaggctggtttacgcgttttggcccgcagcatctggtgctggcgcttgacgtgcggatcgacgcggaaggcaacaagcaggtggcggtcagcggctggcaggagaactccggcgtaaccctggaggagctggtggagagctatcagtccgtcggcctgcagcacgtgctgtgcaccgatatttcccgcgacgggacgctggccgggtctaacgtctcgctgtatgaagaagtctgcgcccgctatccgcaggtcgcgtttcagtcttccggcggcattggcgatctgcatgatatcgccgcgctgcgcggaaccggagtgcgcggggtgattgtcggccgggcgctgctggaaggtaaatttaacgtaacggaggccattcaatgctggcaaaacggataatcccctgtctcgacgttcgcgacggccaggtagtgaaaggcgtgcagttccgtaatcacgaaatcatcggtgatatcgtcccgctggcaaaacgctatgccgacgaaggcgcggatgagctggtgttctacgatatcaccgcctccagcgacggccgcgtggtggacaaaagctgggtgtcgcgggtcgcggaagtgatcgacattccgttctgcgtcgccggcggcattaagtcgctggacgatgcggcgcaaattctctccttcggcgcggataaaatctccatcaactcccctgccctggcggatccgacgctgattacccgccttgccgaccgtttcggcgtgcagtgtattgtggtgggcatcgatacctggtttgacgccgcgagcggtaagtatcacgtcaaccagtataccggcgatgagagccggacgcgggtgacgcagtgggaaaccctggactgggtgcaggaagtgcaaaagcgcggggccggcgagatcgtcctcaatatgatgaaccaggacggcgtgcgtaacggctacgatctggcgcagttaagcaaggtccgcgccgtgtgccacgtgccgctgattgcttccggcggcgcgggcaccatggagcacttcctggaagccttccgcgacgccaacgtcgacggcgcgctggccgcctcggtgttccacaagcaaattatcaacattggtgaactgaaaacgtacctggcagcacagggcgtggagattagggtatgttaagtgaacagctggattggcaaaaaaccgacggtctgatgccggtcatcgtgcagcacgccgtttctggtgaagtgctgatgctgggctatatgaatcaggatgcgctggcgaaaaccgaagagaccggcaaggtgaccttttattcgcggaccaaacagcgtctgtggaccaagggggaaacgtcgggcaatttcctcaacgtggtgagcatcaccccggattgcgataacgataccctgctggcgctggttaatccgattggcccaacctgccataaaggcacctcaagctgctttggcgaaaccggccatcagtggctgttcttatatcagctggagcagctgctggcggaacgcaaacacgccgatccggaaagctcctataccgcgaagctgtacgccagcggcaccaaacgtattgcgcagaaggtgggggaagaaggcgttgagaccgcgctggccgcgacggtgcatgaccagttcgaactgaagaatgaagcgtcggatttgatgtatcacctgctggtgctgctgcaggatcaggggctgaatttaacggatgtggtggaaaacctgcggagcaggcataagtaaatcatcaaagggaggcggcatgacgcctcccttgcaatatcaacattgccagcgcgctggttgatatcacctgtttatcatcgtcatgacttttttcgtgcggttatttctttaactagtctcaatggtttcgtcattttccatgataaagatgaaaccaaatctgtatagcgctgagtcagctcctggtacgcattttcaatgctgagcaatttctgttgctgagtttgatactcgtcctctaaatgcgcattccgctgttcaagctcgtggataatggtggttttatcgccaacctgcgccttcagaacatcaatttcacttcgctgagataccgccgactgtttaagagaagtcatttcttcctgcagcgttgagttcatcatttgtgcatgttcaagctcgcgtaacgctctgtctttcagcgaaaaaatatactcttccgctgactgattaacgatccgggcatacgcagctttgataaagtcatcataaaaatcatcacgatcgatttctaaagataagatgaacgactttacttcattaaacaacgggttaaacgtaccgccagaaatcgtattgagatgccactcaagaaaaacaacggcgtaattattaaaatcacgacttctggacgccagtaaatcacgatcttgcataaacaaacgtagcgaagttaatgcctccagcgcgcagtgccacgaatcttctctggtggaggaaagcgactcagcgcggtggatagtatgagagattaagatctcatcaaccagagagatgcgatttgctaacagcatgaaacaactcacaaagtacaggtcgtttgtggttctcagcggttgaaactccaggcccattgccaggatagcctcgcgtctgaagagcttatcccatggccaccatataaaggctctgaaaaaatcgtcagcaatttcccgtgaagagaagacctctttttcaggcagtaaatcctcacgcgccgacaaaggcatgggagaacgggtattggtttgcaaatcgactgactggcaccggcagataacaacatccgtttgcagggccgtagcccggtcggacattctctttaacatctctttatcggcgtaatcgtcatcgtcgaggaaaatgatgtattcgccggtcgctactcgtaagccgatatttcgcgattcgccgccaccgacgttgctcggattggtgataacccggactcgcgaatcttcactggctattttagtgacaatatccagagtattatccgttgagctatcgttaacaaggataatctcaatctcttttaaagactgggctaacaccgtagtaagcgtctcagcaatatactccgcggcgttatggacagggataataacggatacaataacgttacttgattcatcagacattcaatcaccttcaaaataagaggcacgcaatcattaaactcatcatgcgtttgctgagcagttacatagcttaaaatgcaaccgcttcggaggtgtttgatttacatgaagctgtaatctcttgcgttacatcatccctgaaccacatcatgataagtctttaaggtcttgctaatgatcataccgctagaaaacttatcctgaacgcgttgccgtcctttgatacccatctctactcgtgctttgggattggctaacaagaattcaagcttatcggccagctcctgcggagagttacttttcacgataatgccgttatcgttattaacgatcaggctatcgcagccgccaacatcgtaggcaatgcaggcccggccaaccgaggaagcctcaagcagaatacgcggcacgccttcggaatagatcgaaggtaatgccacaatgttcgactcctcgatcaagtcgcagacgttagagctgtgccccaaccagttaatcagaccttctttatgccattgctggatcaccgcaagggatatagcatccttatcgttttcaacgagtatcccggcaacgtttagcgtaaaatgaatatttcttgcttcgaggattttcttggcttcaattaaatccccgagccctttactccagagcattctgctggcaaacagcacaaccggaacgtcacgctcctgctccagagaatatttatagatctccggattgatacccgcgccatcgatgacaatagtctgctgatagtcaatcccgacaaaacccgccagttttttacgatctttatcgtgctcaaacataaatatactgcgcttattactggcaatatatttgtaggccatgatggtgatattgcgcaatagcttaagcaaccccgtatcacctgaaaatacacgacccagaccgacaaaactcacgatgacgggacggttgtttgtcctggacaggagcccaccgatcagacagggtttaatagtaatacagtgtaaaaggtcgggattaatttctttaatgagctttcgggaggcaaaaaaggcccgaaagaaagttaatgcattaaatgattgagcatcaagtgggacattatgacacttaaaaccgaatgttttaaatttattcagcactttaccgtcgacaaaatgactgatgatgtgaatctcataaccagcatctcgggcggcgatcgcacgatcaatccagtgcaaatcaaaataccaatccgagtttatgaaataacacagttttttcattgctatatccacttaatgattcttaccgctgattccttttacaccatggataattccacgacgcaagtatttaaaatataacaatttattgcgttgccatggcaatattgatacatatttaatcaaccgtaaaagaattgagagacggctaaaaatggcaactcgcggaaaaattctcttcgccaaaataagatttcgacaaagataataaaccttccattcgggaacaatacatttcccctggatactcacatcgtgggtaaagatgacctcgggagaatagcgaatagcttcgccatctaatgtcagctgatagccaaaatagagatcgtcaaaatataaaaataactcgtcgtgaatactgtggagatgcttttgcagcacatctcgctgaataatcataccgacaaaggaaaccgtctgtaccgcacacgcccgggaaaccgacggaagaaactccgcaggatttctgatgtagcgtaatgtgtccataaacgatgacggaactttggcaaaaggcatgttcatcggacagggttgcccctgaagatccttgaccaaagcggtgaacacccgacagttagccttttctagctgggaaaatttttccagcgcatcgctctcgggccaggcgtcatcatcgtaaaagaaaacccagtcgctatcgacgttgtcgcataaatattgactcccggccttaaagccacccgcgccaccgctgttggatggcagattaagaacaatcactcgcgggtcgctaagggtggctaaccaggcctgggttccatccgtggacccgttattgacaacaacgatcgctgtaaaatttaatttcaccgtgttggcaatagtcagctttaacttctctaaacgattatacgtgactattaatgcggagcaattcatcgcacagaaaccgtaaatactggcatagactcattactgctaagggaggacaagtacttatcggctgtatttaatgcttctgcgatagtgacatccatatccagatatcgataggttccaaggcggccaacaaacgtcatattcttttcattttccgcgagggacaaatatttatcgagtaaagccatctctcccatctgacgaatcggataataagggatatccttttcaccacattcgcggctgtattccttgtaacagaccgatccctcatgggattcccagggcgaaaagtacttatgttcagtgatacgggtataaggaacatccagcgagcagtaattcattaccgcgcagccctgataatcgccctgccaggtgaatttttcaaaatccagagtacgatagcccagtcgaccatattgataggaataaaaagcatccagcggcccgctatagaacacgtgatcgtactgttctctctcttcagcgttaaacgattgctgaagttcgatggtaatattttcatgattggcgattgactcaatcattttcgtataacccagtttcggcatgccctgaaatctgtggttaaagtaattatcatcgtagttaaaacgaaccggcagacgcttaagaattgacgcaggaagctgcgaaggctccatcccccactgtttgatggtatagcccttgaagaacgcctcatagagctctttgccgataaaacgcagagcctgttcttcaaaggtcttcggttccaggatcgaactgtcccctttttcggcaataagcgcccgggcctcatctggcgaacaggtcttcgcaaaaaactggttgatggtatgcaggttgatcggcagagagaacacctggccattcacggttgctttgacacggttcacatacggcatcatctcagcgtgctgagtcacataattccacactgtttcattatcggtgtgaaagatatgcgggccataaacgtgaaccataacgtcggtttgcggatcgcgcgcatcataggagttaccgcctatgtggtcacgctggtcaataattctgatgtgatgaccttgttcagcgagttggcgtgcgataaccacaccggaaaaacccgctccgacgatgagaatatttttactgttcataatataactccagcagccttaaccaagaattgagcgtctaactttatagtagtattttgttatcgtgtttcgcctcggtgaaccaacaggagcatatttattgaggaaaggcatcaacgcttttttgatcttagtctgaagcagaactggcgtttgcactgcagtttgcgcaggacttgatgaatttaccggagataactgacggaaataggtctctttttcccatggcgtattgatgacgttttccaggaaatcgtcataaaagtcaaccttgtccgtattccacggtttattctccccggcatagtgaatcatattcgggttctttctggcttttaaaaagcgcatatatgttgcgaactggagattggggaaaaagtcatccgtattgccattaccgtgatagacattccactccagcggtaaaaactcaacccggccatagaagactttgttcatgatgtcctggtcgaggaaccagtacttcttctctttgagcgttttaatcagcgcggagaaggtatcttcctgcaccatctgggcaacgttaaaaacgataattcccgcctggaaatactcatccggattggtcattttaagcgttttttgcagatactcgccggcgggcatcacgccatctgccgactccgacatcgcaccaaacttgacgaagccttccatcacgatatctttaacggcggcaacaaggtttgtgccgaggtcgacattaagcaaagtcgcaagatcggccttcaccacagtatcggaatcgataaaaatgaccttctcatattcacggaaaagctgcggaataaacaagcgagcgtaggttgatgcgctaaagtgtgcgcgggtatgtacgccattcaattcagtaaaggcattcacatcaaagaaacgcagtgaaaagttttgctgtcccgagaccagttttagtaagcgctgtttgttaaggttactcaccttattttccagcacaacaatatcgtaatgggtgtttttatcagaatggcgaacaatggagttgattaaggctccaccgctgatggcatagttgtcatcaaaactgatgactatcggcgcagcgtgaggaaaaaccggttccagcttgccgttgaatgtctcattcgtcacgaaagtgcgctgaagttctttaactttcagggcccggtcttgctgctgcttaataatataaatgttaaaaagacgctcagcaatatgtccaataacacgcttttcttgcgcgttataattattcatagagatgcggctttcaagattagtcaaaatcgcgaagagccattctgaataatctacgaacatatctttgtgcatcacaaacatgttcgtataatagccatctgtggcattgttaaactgctgaatagccgctttataatccggataaagctcttcgacaacctccagggcagccagatagtcctttatatgtaaaaactcacctttctcataatgatcgaggttatttttactgccggcagaggtcacagaccacttctttggtaacagcaggtcaaaccctgaaatacaatcctggattgccgtgtcggttaaaccaaactgcttttcatactctgcatcaataacgggtgaattaacgacgccccaattatcttcgggaaagctctgctctgaggaaaagttcagatgtcggcgataatgcataaagccgacataatcagaaagagattcatttttccaaacccaataatgtgctgttaactcacagtaaaaggggtttttaaaagaaatattatcaccggtatcatcgccaatacagccgatatcattataggagttggctttacccacatgtaatggtttgataatcgatgcattaaggaatgcactcggcttatgatgacaggtatagatcttaatactattcatttaattaccagatttaggccattgcttgtttataaagttcgatgattctttcagcggaaccgatttcccgcatacggtgattttcgatccagacaacccgatcgcatatcttttccacatcactcatgttgtggctaacaaacaatattgtcacgccacgatttttgaactctttaatcgtcttgatacatttggcctgaaaagaaatatcgccaacggcaagcacttcatcgataatcaaaatatcaggctcaacttgactgataacagaaaaaccaagcttcgctagcataccgctagaatagacgcggatcggctcatcgataaattcccctaattcggaaaattcaatgatgcgctccattcgctgctgcacctctttacggcgtaacccaagaagtgtggcattaagaaaaatgttctcgcgccccgtcaattctggatgaaagccgccgcccagctcaagcattgaagcgactcgcccacgggtggtgaccgatccttttgtgggttttatcacgccggcaaccagccccaaagatgtgcttttgcctgcgccatttcgcccgatgagcgcaacggcctctcctttaccgaccgtaaaagaaacatcctgaatagcaagatatttgcggcccttcagtaattgaaatgctcttttgggatgaaatattaaatctttaatacctgagccaatatgatggtaaagtggatactcttttgtcacattattaaaatcaattactggttccatcacaagatctctgcaaagcgatattttaatttattaaaaatactcagaccgataaccgtcagcactatacccgtcaaatataatactgaaatatgctcatagtttaaaaccccatccataaataagttgcgccagcttaaaatcatactcgccagagggttatagtcaataacccagctatattttgctggaatcatatcggatgcgtataaaattggcgtacagtagaacattaacataataccgagagtcacaaatctttccagatctctaaaaaatagattcaacgttgaaaagattatagatatgccaaaggtgaatatcacctgcccgatagcaatgagcggtattccccacagccacgaaagcgaaggacgcataccgtatacaaaaagaaaagcgacgatgacaggaatggtacacaagaagtgtaacccttccatcatgacattactgagcgggataactgagcgcggaaatacagtttttttaataatttgcgcattagcaataaatgaaaaaagtgaatttgttgctgagcttgcaaaccactgccagggaaacagccccgttattagaaaaagggtataattaggtatctgaacacgcatgatcagtttgaaaataaaatagtagatcatcgcaaaaagcaaaggattggcaattgaccataaataaccaaacacgctacttttataccgtacctttagatctttattagtgataacaacaagcaggtcaaataaataccctagattatacttcatttttatactcataaattattctacgaaattttaagcattttgttatgcactttagatttcgcgctgtagctgactaaacccccgtcagctgcgatagctctaacgcccgaacttatagattgccgctagataccgtgacttgagcatacgagctgaaaacctaagcacatagattaaagcaagattttcccgagttttgtctccgctttaatgcattggcagcagccgaccattgtagatcttgcataccgaactgggacaagtgagatgctgacctggagatgaccagttaatgtgctgtttcatggcaaacagtaaaaactgctatttttcagtcagataccccctccccttaatgttatgagatagctttaaatcacgctaccgcccttggctgtcgcaaccaaactgcgtaatgattcatctatcttgtctgtcaaaacctccagcgcctgttatcacaaccacagcgcactggctcaacgccgtcctgacgttaaacagcggctgtcgaaaaagtggccgcccgtgacaccgggtgttgctcgcttgaaaacgataaagattcaagcaggggcacactctcgctgtttgctttcgcctcatccatcaggaatttctcaattcgctcatccgacaagcctgttttccatgcgtcagagggctctgtctccgttatctacccattcatcttctgatgaatcagcgcaaactgtgctccaatattgattgaaatgacgccaacaatcagtttagtgtcatatttaatgctgcgcacaggatagctgattaagctgacaacacaatggtcatgcaaatgagcagcagcattatagcgctggtctataggaataaaaatgaaaatacgttgccaatcaattcatattgcaaatgattcagcaggtaaacataatttaaacaaaatttagaaaagaaaacaactctttgatttaaaaagaaaaatcttaaaaacccgccttcaatgtgaaataattgtaaactcaaacataaaatcaattttaatctgcgttatttctccggggcataaaccatccgggcagaacagggaatcctgagtacgcgatcaaaccatacgcaatcattaccttgctaatcataaagcacagataatgaatttcattcaaactacagaacgccagtacaaacccattgatatccggacgccagcgcttccccaacgaacacatgaacataatcagcaacggtaaagcaggtgatccacacggcaagccagtgtaaaatcaatgaatatatagcgggacacagtcaccccagaggatgaatatgaaatttttagtaactggagccgcaggattcatcggctttcatacctgcaagcgccttctggaggcgggtcatgaggttgtcggcctcgacaacatgaacgactattatgacgtcaatcttaagcaggcccgtctggatttactgcaatctcccctgttcagttttcacaaaatcgatctcgcggatcgtgaaggtattgcccggctttttgctaacgagaaatttaaccgagtgatccatctcgccgcgcaggcaggagttcgctactccctggaaaacccgttcgcttatgctgacgctaacctgattggttatctgaacattcttgaaggctgcagacacaacaacgttgagcatttgctctatgcctcatccagttcggtctatggtctgaaccgtaaaatgccgttctctacggaggattcggttgatcatccggtttcgctgtatgccgccaccaagaaagcgaatgaactgatggcgcacacctactcgcatctttatggcattccaaccaccggactgagattcttcaccgtctacggcccgtggggccgtccggatatggcgctgttcaaatttacgaaagccatgcttgagggtaagagtattgatgtctacaactacggcaagatgaagcgcgacttcacctacattgacgatatcgttgaggcggttgtaaggatgctggacattatcccgcagcctaatccggaatggaccgttgaaacgggttcaccagcggatagctcagcgccgtaccgggtgtataacatcgggaatagctcaccggttgagctcatggattacatcactgctctggaagaggctctggggatggtggcggtgaaaaatatgatgccgatacagcccggcgatgtgctggaaaccagcgcagataccaggccgctgtatgatgcggtgggattcaggccgcaaacgacggtcaggcagggggtgaagaacttcgttgactggtataaagcctattacaaggcgtagtcatatcaggcattgtggatttagccgcagcagaacgctactgcggcttttttatatctgaaatggtcattggataaacttatccatccctgctgcgagttgagatacgtcatttattcatgacctgccgctgaaaaccacacaatacataaacgcagatttaacacgaagcaaacaaaaccttcaacaaactctcatctaagccacttccattaccctcactgaagagcattaccttataaagcaaacaatccccagctcatcagtctgccagcaaagtcggccacagcgctattgttcaacgtaacggtaatgaaaaagttttttccacttttctcaaaaaaaaccacaaacaccatataggaactttcttaaattcaggctatgttaagcaggcaaaggcatgcttttgcagagatattagttcgcaggcaaatggatttataacattcctttcattctggtacgcattatggcaaacataattttcttagcagttgctgccatcctgttgattgtttcagtctattttctgatttcttatatcaaagatcagaaaaagaccaagctgacttttaacaaacgaaagtggtgaaaagaaaacttaatataattataatacaggcataggaaatcataatataaaaataaaacactgccagcggtggggatacgcatagtctttacagctggcattggatatctttttaaaataaaaatgtcatattaaactgatactatatccttagcatcagcacgctattctcacggccatgaatggcttgcgtttgctatgcctgcgcccttcccttgaaagatcccgcccctccccgtttaaatatcaatcagcgcctcaccgcaacgcagtacgcctgagagcccgggatccagaaacaacaaaagcctgcaagcaggctctgttttaccttccggcgcttatctccagcgtctacatcacagtgacggtagctcttcacaaggtgaatttaacatatccgacctcaatggttgggacaagatgatcgattgaagaatttaagcgaggtcacgttttttaatgagttgagtcgggaaagaggagcaaaacgatttgtcgggcgaatagctgaacccttcaggagagaggagaactctggccgacagcgcatctcccggccagaggggggatttagtcactaccgaacaaatcgcgggtatatactttgtcagcgacatccgacagctcttcagccattcggtttgagacaatcacgtcagcttcttgtttgaacgcgtcgaaatcgcgaactacgcgggaattaaagaactcatcttcctgcataaccggttcgtagataatgaccgggatacctttggccttgatacgcttcatgatgccctgaattgaggaagcgcggaagttatcggagccactcttcatgatcaggcgatagataccaacaactttaggcttgcgcgccaggatagagtcagcgataaaatctttacgcgtgcggttagcatcgacgatggcaccgatgatgttattcggtacagattcgtagtttgccagcagctgcttggtatctttcggcaggcagtagccgccgtagccaaaggatgggttgttatagtgattaccgattcgcggatcgagacacacgccttcgatgatctgtttactgttcagaccctggctttcagcgtagctgtccagttcattaaagtaggctacgcgcagcgccaggtaggtattggcaaataacttaatcgcctcagcttcggtggagtcagtaaacagcgtcgggatatcctgcttaatcgcgccttctttcagcagattagcaaaacgctccgcgcgttctgaacgttcgccaatgacaatacgagacgggtgcaggttgtcgtaaagcgcgcggccttcacgcagaaactcaggagagaaaatgacgttatcaatgcccaggcgctctttaatatcacgcgtaaaaccaacgggaatggtggatttaataatcattaccgcgtctgggttaatctcggtgacatcacgaataacggcttcaacggtcgaagtattgaagtagttcgttttcggatcgtagtcagtgggcgtagcgataatgacataatctgcatcacgataggcatcatgcttgtcagttgtcgcgcgaaaattcaacggtttttccgccagatattcctggatctctttatcgacaatcggagaaaccttttggttaatcatatcaactttggattgaatgatatccagcgccaccacttcgtggttttgcgcaatcaggatgccattcgataaaccaacataaccggtaccggaaatagtaattttcattcgatcacactttaatcagttaactggacggcggcagatggccgcaaattaagcaaaactgttgatgtttctactctcaggaacaatgtaagtcaagcaagacaccaacgctctctgaaatactgtataggcctataaagggcctatacagtaaatgaagctatattttatgcttatttatatacttcagctgtctttaaggtatgagcctgcaaatccttatcagataaagagagcgtacagtctgcaatctccggccactgaatattaatctcagggtcgttccagataatgctccgctcagactgcggcgcataatagttcgtagccttgtacacaaactgaaccgtttcgctcaacgccatgaagccatgggcaaacccttccgggatccacaattgacgcttgttttccgcgctcagtaccgcccccacccatttaccaaacgttggcgatgaacggcggatatcgaccgccacatcaaacacctcgccttcaatgcagcgaaccagtttgccctgggcatgcgggtcaagctggtagtgcagcccgcgcagcacgcccttctgcgactgggagtggttatcctgcacaaactccactttccgccccactgcttcatcaaatactttactgctgaagctctcaaagaaaaaaccgcgcgcatcgccgaagacacgaggttcaaaaatcagcacttcagggatatctgtcttaataatattcataatatttctgcccgtttacttgcccagaacttctgttaccacgcgcgccacgccctggcgccagtccggcagcgttacgccaaatacacgctggaatttctcattcgacagccgcgagttcagcggacgttttgccggcgttgggtaggccgtggtcgggataccgcttactgctttgattgccagctctgcgccgtgcgaccgcgccacctcaaaaacaaattccgcgtactccgcccagctggtttccccgctggccaccagatgataggtcccggctacagcacggttgcgctgttcttcacgaatggcgattgccgtacagtccgccagcagctctgcgccggttggcgcaccgtgctgatcgttaataatcgacagcgcctctttctcacctgccagacgcagcatcgttttagcgaagtttgctccgcgggtggcatatacccaactggtacggaaaataagatggcgcggattcgcctgctccagcgcgatttccccggctcgtttggtttcgccgtacacgttcagcggcccggtcgcctcatcttccagacgatagtggcttccctgaccgtcaaacacatagtccgttgagtagtgcaccatcagagctcccagcttcgctgactcttctgccagcaccgccacgccccgatcgttcagcagatcggaaagctcgcgctcgctttccgctttgtccaccgcagtatgggcagccgcgttcaccactacatccggttttaccgtacggaccgtctgcgcgatcccttccaggttggtcagatcaccgcacagcgttttatcaaaaaagtccacggcaaccacttcgcccagcgtggacaacgcacgctgcagctcccagcccacctgaccatttttgccaatcagtaaaattttcatacgttaatatcccaatgatgaccggcagccattaatgctcattcagcagacgtttcaggtaagcaccgtactcggttttcttcaaccgttcggcctgtgccgccaccccttccgcgctcagccactgcttgcgataagcaatttcttccaggcaggctactttcatcccctgacgcttctcgatggtatggataaactgagaggcctcaatcaggctgtcgtgggttcccgtatccagccaggcaaaaccacggcccagcagttcaacctgcaggtcaccccgatccagatacatctggttcagcgtggtgatctcaagctccccacgcgcggagggtttaacttccttcgccattgccaccacatcggtgtcataaaaatagagtccggtcaccgcccagtcagatttcggcttcaacggcttctcttcaatcgacagcgctttaaagttctcatcaaactccaccacaccgaaacgttccggatcgagaacctggtagccgaataccgtagctccggatgttttgctggccgccgcatccagtttgcggccaaagctctgaccaaagtagatgttatcgcccaggactaatgcacaggcatcattaccgataaacttctcgccgatgataaaggcctgcgccagaccgtccggcgacggctgaatcgcatagctgaaattcacgccaaactgagaaccgtcacccaacagacgctgaaatgcgggcatatcctccggcgtggtaataatcaggatatccttgattcccgccagcatcagaacagaaaccgggtagtaaatcatcggtttgtcataaatgggcagtagctgcttggaaacaccctgggtgatcggatataaacgcgtgccggagccgccggccagtacaatacctttcatacttctttcctttttagttgttcaggccaagacgttcaccggcataggagccatccagcacgcgctgccaccaggtcgtgttgttcaggtaccagtggaccgttttttcaattccgctttcaaacgtctcttcgggcacccagcccagatcgcgttgaattttcgccgcatcaatggcataacgcaggtcatgacccggacggtctttcacaaacgtaatcagatcggcaaactggctgatattgcccggcttctgttcaaccactttatcgagaatggcgcaaatggtgcgcacgacatcaatatttttacgctcgttgtgaccgccgatgttgtacgtttcaccactgcggccttccgtcgccactttgtatagcgcccgggcgtgatcttccacgtacagccaatcgcggatctgttctccgttgccgtacactggcagcggtttgccggcgagggcattgaggatggtcagcggaataagtttttccgggaagtgatacgggccgtagttgttggagcagttggtcaccaccaccggcaggccataagtgcggttccaggcgcggacaagatggtcgctgccggccttggaggcagagtacgggctgcttggcgcgtacggggtctcttcggtgaacagatcatcggtaccgtgcaggtcgccgtagacttcatcggtcgaaatatggtggaagcggaaagtctgcttctgcgccgtatcgagagctgaccagtactggcgggccgcttccagcagggtgaaagttccaatcaggttggtctgaataaaggcagcaggcccatcgatagagcggtccacgtgactctctgcggccaggtgcatcacaatatccggacggaaatcgctgaactgctctgccacagatttggcatcagtgatatctgtctgagaaaacgagtagcgtttattaccggcaaccggcgccagggactccaggttaccggcgtaggtgaggcaatctattacgcgtacttcgtcggaggtgttttcaatgatatgacgaacaactgcagaaccaataaaacctgcaccgccagtgacaaggatcttcatatttaacttaccttttattaccagagcctaataaaattcgaaatatattccttaggatatgagtatcatattaaatgatttcctttagaaaaacatttgcaaattacgtttttaaaaaattaggataagggagtactaattagaggagaggaattctattttttgaaaatttatgcccgggttaataccccgggcaaatgacactataaagtttattccatccactcagtgtggaacacaccctctttatcggtacgcttataggtatgcgcaccgaaatagtcacgctgcgcctgaatcaggttagcaggcaagactgcggaacgatagctatcgtagtaggcgatggccgcagagaatgtcggaaccggaataccattctgcacagcatatgcgacaacatcgcgcagggcttgctgataatcatcggcgatctgcttgaagtatggtgccagcagcaggttggcaatgccggcattctgctcataggcatcagtaatcttttgcaggaactgagcacgaatgatacagccggcacggaagattttcgcgatctcaccgtagttcagatcccaatggtattcatcagaagcagcgcgcagttgggagaaaccttgagcgtaagagacgattttgcccagatacagagcacggcgaactttctcaacgaactccgctttatcgcctgcactcttcgcctgcggtccggtaaggactttcgaagcagccacacgctgatctttaagcgaagagatgtagcgtgcgaatacagattcagtgataagtgacagcggttcgccgaggtcaagagagctctggctggtccatttaccggtacctttgtttgccgcctcatcgaggatcacgtcgaccaggtatttgccttcttcatcttttttggtgaagatgtctttagtgatgtcaatgagatagctgctaagctcaccttcattccattcggtaaaggtttgcgccagctcttcattagaaagcgccagaccacctttcagtaaagcgtaggcttctgcaataagctgcatatcgccgtattcaataccgttgtgaaccattttgacataatgaccagcaccatcagcaccgatataagttacgcacggctcaccgtcttcagcgacagctgcaatctgcttaagaatgggagcaaccagttcataagcttccttctgaccgccaggcatgattgaaggtcctttaagcgcgccctcttcaccgccggacacgccggtgccaatgaagttaaaaccatcagcagaaagctcacgattacgacgaatcgtatcctggaagaaggtattaccaccatcgatgatgatgtcacccttgtccaggtaaggcttcagagagtcgatggcactatcagtgcctgcgcccgccttcaccattaacaggatacggcgtggagtttcgagcgactcaacaaactcttgcactgtataatgtgggaccagcttcttgccgggattctcggcaatcacttcttcggtcttttcacgggagcggttgaaaacggagacggtataaccacggctctcgatgttgagcgcaaggttacgccccatcactgccataccgacaaccccgatctgttgcttggacattacatactcctgtcaggtgtggtcactgcgacaagctcgcagcttaaatgtgactactatgttagcttaaagcttctcaaccgtatagactaaatatttattctagagaacgagttaaaaatgaaataataaatagcatgtaaaagccttatccaaataccagtaactaattaaaaaaatttattttcatgtgcttattaaatgctttaaacaatcttttatcaattagcattattgatatgatataaaataaaaaagaaagtacactaagtgaaattaattttacaaaaccatcaatattctgtagaaaaatgacattattcattaatagcttaataaaaaaaatcattagggcagaacccaacattaacttataaatcttcgaaaaaaattcgagaagagacccatctaaaatttttaatacacaccacatcacagggatgaagtttaaaatatttgcaatgaaataaaactttgcaaaagtcacaatgtcaaactgaacacctaaaataaaagaagagacctgaagaatcatccccagaaaacctagcttcattaatatatatgttttacccttagccataaatatagtgcctgaggtacttagtacagcctgtacgataccagtaggtgcaagccaagtcaaaattgaggctgttaaaagccaactatccccaaaaacaagtttaataaatggctcacttaacatagcaagacctgtcattaatgggaatacaaggagcaatataagatacaaagtattgtaataagtttttttaatttttcgttatcatcttgatactcactaaacacaggatagagagccctagaagcaacaaaagtcatattttgcactgggaaaagcataattctataagctagtgagtaagcacccagaatagctgatgataaaaaatgcccgataataatactatcagcattccttgaaaaataattaataaagttaaaaatggtcaaattcccactaaaaccgatcagtttttttatctcttgcaaatcaattataatttttgtattaggcctccattctgatttaaaccaaaattgaatagttgacatcaatgagagaaatatgctctgaaaaaccaagctataaacaccatatcctctataagccagtataatagcaattgaaactgcaattactgatgacgatatttcaataaaagcaatctccttaaatctagattttttttctaacaaagcaagatgcgctgatgccgtactagcaagaggaaagctcaatgataataaacataaaattagaacaagcctctgttcatgaaatatcaatgatattatcggcgatgagatgaggatgatgatagctatcgcacatcccatacacacattaagccaaaatattgcattaatagttctttcctcaaggtttttcttttgtataattgcagctgcagtccctaaatctctaaccaatccagcaaaattagttacaaccaatgccatagccataagcccatactcgccaggcggaattagtcgtgctaaaaccacaatatttaataactgtacacccacttttattccctgcgagagggcaacccacttagtgtttgataagagtcccatacaacctcagtaaagatcatttaaacatgaaagatcttttaattagatattataaatcgaattattttactcttaacctcatttatatgatatatgaggaaaaatcagaccagagaataattaaattatgacactaacgatatccatttgttttttatttcttgactatcgaattttaaagaggtctttttggtgtttttgcttaatttaaagtaacattcatcatcagttgataaaagattcattttctcaacaaacaattctttgttattaattggaattaagaaaccatcaatatcattctcaatgatctcacgcggtcctgtcggacaatcatacgctataaccggtaatgaccaagattttgcctctagcaatactaacggtaaaccttcataacgtgatgtcataagtaacatatcactctgtgcataaaatttatcaatatctttaactttacccaataatgtgacagtatcttcaatattataatttttgataagttcgcttaattgctggtgaagtaaaccatcacccgctataaataatttccagtttttattatttatagaaaaagatcgccagatatcaagcaataaatcaaatcctttttggtgctcaagtcgcccaacagccaaagcatgataagttctgttgtgcctatcaaagtttttaaaagaaattggattggctatctttaaagagttaaccccccatttttgaagaatagttttgtctttatctgttaaaactataactttgtcataaaatcttaaaaagatgaactttagaaaacggacaatgctattaaatgaatggattgcgacatgctcgcaagcaaaaagcttacaatcattgtttttaaaacgtgaaaaaatattccaaaatgagtacattacactcagtttacccatacttataacaaagacataatcgaaattgtttttatttacatcatcaacaatctttttaattggatttttatattccttgtaattaattatcttttttactttcctatatggataaaaactatctccttctccagatacagaaaaaatagtcaagtcatataactcaccatagcaatcactcataaagttacatatattttctgttcccgcatatgaatatgcgttattgatcacaaatgctatttttttcaacccaacccccttatcacaaatattaaattaacgatttactattaaaaaagaaatagcattaagtatataccaagaaaaaaaatatagtattttaaaagggttccccttgtatctttgagtcagtatatgaaaatgccatttcactgcatttttcttattggccgaaagtgaatcatttaaaacataataattaaccaaaccttcactaattacatacgcttcattataaatatcaaagtagcttgctaaataaataaaatcctcatgaccttgatctttgaaatatatattttcatttaaacgtttaatacatacagacgaaaaacatacgcgaaaatgtttttttaaaaaactattttttttcaaaacatttgaattaaacttaattacgtgttttttattattaatatcatagaaataccaagataacaccatgttataccctttagatatagcatccatttgtttttctaacttatcaggaagccattgatcatcactatccaaaaaagctataactttttcatttgaatattttagccctgcattccttgactcagccgcccctaagttttgatcattattaattattgttattttatcactcttatatctatccatcaccatttctaatgacgaatctgtagaacaatcatttataatatacaaatgccattgagtatatgtttgtgaaaatacagattctatcgctctgattattgttttctcagcattaaacataggaataattactgcaacgtatttctcatcaattttgtccatcatactccctctggtagagataaaaataatatagcaagattctcatatcttaaataataaaaaattttaaaagagtgggaatattgcattaagataatcaatctagaagacttctgacatcttgattaccatcattaaattttctggcaaaataaggacaatatgtaatatcgtatgttttattataaaaaaaatcattttctttaaataatgaaatatgcttctcagtcaaagctactggcgggtttacaccttcccaatcagtataccaaataccaggactcacgttattaaagaaatcagaattacctataatagtcggaaagaaagactcttcggcacaccaagatgtcttaaaaaagtcaacaaagtgagggtttttatccataaaatcaagtatataatcaacacatgatcccgagagggcacaccatgtcgatccatgataaattgtgctaaaggggtaatttttcttccgatatataattcttaaaaacctttcagctagcttatatattactgtttttaacgatttactacgtctatcaaaacaatcaaagtaatgatatctgatgcgatcctctggtttagtctggtgaaatccttgcataatagtaatatattctttattcttgcttagcaattctaaaaactctgagcggtccctaattgggtaatcttgaccactcataattacatagtaatcaggtttctctttttttgcttcatttatcaaatctaaaattgcctgttggtgagaccatcctccccaccatacttccactgtgctaataatagtgagatttttttcattttgagaaaatgatgtaaaaaaatccggaattatagtttttttgtctatgtgtatgtaaactaatgaattgtcaactttaatttttttaatcaatgctattaaatgattaaaattattataagccgttattaaataagccactttcattatatcaccatgtaaatttaaaaagaatcaatatttccaattagccttccatctaattaccggaatattgttatcccaatcaattggtaaccagatatatgaactatctttcaaactattactttgccaccgaactgccataaaaatatatgtgttattagagccaacattctgtattacgaaggttccttgagaggaaaaagtttttttaatattatcaacatcatcagagcgaacaggattacctaaagaaacccacggtccaaatatattatcactataggaactccgtgcgtcagtagggctaaacccttttagcccagatgtaatcatataatatttacttttgtatttaaacatcgtaggggcttcgttcattaaacctactaaaactcttgaatatctcccagtgacgcccttatagctatcatccaattctgcaatttgtatcgagtaattcccctccgactcataaattacataagcagtagaatcatcatcaacaaaaagtgtcatatctctaaacatctgtccacgggagaaattgtctttaaaatcattatcagctttaaaaacattattatgataatatttattattaatatcatgtttatccacataaattggatccactgatgcattaggccaaaaatctttatacaaaacataaggtcctgtgattttttttgcaacagctataccggctttacctgtgttatatttacctcccaactcttcatggaaccacattacaaactctttatttttttattataaataactttaggtctttccacagcgatcattgctaattttgatgaaagatctaaagcaattccttcattatgccaattatataaatcagcggaagaatatacgcttaccttcccagtattttttcttccatctgttcttgcttcaccaaaccaataatatttatctttaaatttcaacacgcctcctccatgtgcattgatgacctcgccgttattatcataccacggttttcctggtgtaaagttagagttactacaagctgaaaaagagaaaaaaaataataaaagcataatattttttaccatagaattatccttaaggaaaaactccataattacacattagaaatactgtttttcagttaattaacagagttaacaaggaaatacccaaaagagaggataaaactagtacaaaagaatactaaaattttccataactaaaaacaccgtagtaaagcacactgaaaatcttgcttaagtcaaggacttgcattataaagacaagtgaaggttgtatttcattgagaatagtagaaaagccgagatattcaagtcgcatgatattcactactacacatgaaaaaattaaggcattactgcaactatgatgtcattttaacctaaaatcaagatagaacatatatttcaccctgaaaatcattacatagttaatacttgcatatagaatagtgacaattattcataataaaaacagtttgtattggattaaataactcagtaaaattgacaaaggactcaaatataatattatctgtcatctagttaaagcatacatgatcacgccaaggcatttatacatatataagtttaagcgcaaggtttaatttataacaccaacactgcacacgttataataatcattcactacttaatatacacaatgaataatatatagttagtatactgcacatccgtatactcaatagtaatttaagattgaggttctcagcatttttacttaaagatgctccctaaacaatcgaacaaatatactttaaaaaactaaaaaagtctgtaaatacactcgttttagttcaatacactttttaaaactctaggttcttcgacgattgcgcggtattcttccggcgtcaggttattcgggagttcaaggggccgctcgctattatattcagccagccgcactctgtaatttcccgtgattcaatcagcgatttgaatgaataaaaatttaatatttctatgctgcacgcccgtttaaaccgttcgacataggcattctgcgttgacatgtcaaactgataaatagcaacatcaacacatgctcttctacccattgtgctagcgtcgcaagatcagctccgagccgttgtccatccgcaatttgccactattcaccattctttctaagactatacgactgacagcgtcatgatataaaggtcaactaccctagacagtgcttcacgattaaaatcggtcaacaagttgaaggtccggcagcgtctgacgcataccagcgcatcatgcataaagcagactgaccagctttgattcatctctgctggtatcaccagcagcgccggattgcgcaccagcaggcgctgttttatcttacagcgaaaatgcagattcggcacacaataaacaaagtaaactcttttatggttcagctattgccctgcagcgaaggatcaaaaaatctttttaaatccataccacaaatatcgttcagctgtaatgattagcatcagaataaccgactcatcgagtcacatatccggccgataatgcgggcttagcggcaaacatccttgacggtgcgtccggcttatactgacgtcaaaacagtgatgatctggtgtccggtgaatcggactttgcgcatgacgattttgaattattagcgtatgttttttactaatagatttaatttttttgctaataatactctctaccgcctcatttatatcattatttgcacctaggatgttttttcattattaaaattttgataattagcttaacattacccacattgaaccacactatattttgaattaataattttgatatgctatatataactttataaaccggtgaataatgtaatatacttaaaacagtatcgattaaacgttcattttgccgccatagactatctttcgcatcagaccttgagagtgagtgccataaaaatgaagcgcattgtatattaattacctcacctttatttttgaaaccatgtatacgtctaaagaggctaaagtcaactccatataaagcaaaccgttcatcgaataaagtaataccatttttattaaacaaatcaatcaatataggatagatgattaatccagagccaatagataatacatattcgtcattttcaaataatttctcgctataaaccaccttattatcagcggctggataatatatatcattagtcgcttttgatttaatcaaaggcagttgaagagctatttccaagttttctttattatcatcaatgtctgaaaagaaagatcctggaataacagtatcatcatcaaatatgacaaatcgctcatattgtttgttattgcttagaaattcattatatataatactcaagggcttattagacatatcttgacataacttaacagacaatatcttagcttgtagttcatcaaacaataaatctttgtctaagagcttaggtccattattatatataattagatcatagttagtaaacttattatcattcagtgagatcaatgtttcagattgattgatagatttattatataatattactaagatgatagttttcatagtcatttataaatttacttaattattttttgatatataccatatagttttggtaatctatatgtcatctggtatttcatcactctcttgaaaatttctgagtgttttataagttcaaaactcagaagaggaatattttgctttctgttaagcatatccatatatttcaagctgattgaatccttttcagttaagctattatgatgcttttctataaatttttgatatcctaaataagccttactgctcgttgttattcgttctctattagccccatcgtccaaatacatcgtacatgcgtttaatttatatgcatcaccaaattttttaattattctgaaccaagtatcataatcttgccaagctggcatgttaggatcaaagccaccaatagcatcaatcacagatttttttacaaaaacctgattaccaacacaattatattgtttgatatcattaaaggtaattacttttcctccttcgcttagagtttcagattggacattgagaatgtcatcattaagtaatttaacattagagcaaattagtgagaacttatcttcattactaaaatttacaaagtattctaatcgtctcttatggaaatagtcatcatcgtctaggccagtgatgaattcacctttcgcaacttgaattgctttatttctactaacacacgcaccttgttttttttcatttacaatgtattggaatccctgaaagttattttcaaaggcatttatcacattttcatactcattagtatggactgcatctgatgcatcattacatactatcacctcaaaattttgatatgattgatgcctcagagaaagtaaagctctatgcagaaattgaggtctgttttgagtcgtgatatatacagttactaagttattcattttaaccaccatgagttataaaatataaatctatttttcgttactcacacgatcctttatccaatttccatcattatcaatttgacccagataagatctaaaatcatctgcactataattagaaagtaataacacagaaggtacatataacgtggaccataaacccgccataactatttgtcttctctctaaataaatgttcacaaatactacgttaagaaaaataattgccaaaatgattagcctcactgatttttttattttcagcgcactataagaataacaaaatcctaaaacagccaagtatggcaacacacctaaaatatagcgaccgaatgctgtagctgagactgatgtaatacaggatataacaataaagactcggataaaattatcaaatcttttatactctccatctcgacgcagatagaaaaacaaacaaaataataaaactatcgttttatatgatgacacaattaatttgtttgtattattgccaaattctgataaatcagtgtcaacataaccaccgataaagtaattagctaatccaaagggattaaaatgagcaaaaacatatggcaaaagtgttgaactcgtgaaatagaatatcagcgctaataatattgtttgtaatttgcttagcctaacaaaaaatgaacctattaccgccataagcactaatatcattgccgaatgcgtaatacatgcaagtaaagaaaagaggattcctctgttggttttcttttcaattaaaagcaatgacacacctcttacaaccaatgctactgagaataaaaagcgtaatgtagaggctaatagaattatatcaacaaaacttactgcaaaaaagaataacagtttaatatttggtgttctatagtcacctgtaacctccttttctttcccgatcacatttaaaattgttgtcgcgaaaagatagaacgataaagaactgtaaagagcgggaataaaataaaacgggagccctattttatagaataataaagcatttacataaaataatatgtcaacatgaccacgaatagcatccatatatgttgtactttcattgtatagcatatatgtatcaaggaaccgtctatataaatcttgccaaggtggtatttttattgtaataaaaaaaacaattaacgacagaataataattattcctttcgcattttttttattaaataagaaaatggaccctaaaattgcaataaaagggttaagcattgatgctataaagagtaaaggtaagtctttacttattttcattttatacctgctaagaatagattgcttaaaagatcacatcaaaaaataacctaataagcaccatctctctttaagacaactccaatagttttaaataggatagctatatcattccacatagaccaatttttaacataccatgcatcaaggtagactcgtgtttcataatcaacatcacttcgaccactaacttgccacaaccctgtcattcccggcttacttaaaagataataatcaacttcatcattatacctttccagttctgctgttataattggtctgggcccgacaaggctcatctcaccttttagtacattaaataattgaggtaactcatcaagacttgttctacgtaaaaaaccaccaattttggtaatacgcggatcattttttaatttaaatgttgcatcccattctttttttgcgtctaaatcagtctctaataaattatctagcacttccttagaattggttaccatcgagcgaaatttaagacatttaaatgacttaccatctttaccgatccgctcatgcccgtaaatagctggcccgccatcctgctttactttcctgctaatatagtataatactggtgacagtataataattatagatatagaaccaactatatcaaataagcgttttaaaattcttgatgaccacttagcaagattctgttgtacacgaaaaatcataacctcatggctaaaaataaatgacatatctgtactatctaaaggcatccctcgcagggttggaataactgatacatagcgaaaacctttgatcataaaattacgcaaccaagtattacgcatttcactttgatgagattcaactgcaacaataaactgagtctttttatcttttgtcgctaaccagtttatatcgttcgatagcacaccaataccttcgatatattctcccgcaggagtgcctccctcactagcgataaagcccacaatatttaaaccgaggtttcgctcactacttatcgccttataagcttcaaatgcattatctccacttccaataatccaagtatctcgttgccaatagcttaaggtattcagaacgctcttagttatcatgcgtgcagttggtacaaaaatcagaacaaaaagccaagtcagcatccaaagagaccgcgaatatgaccatgttgtaaaagcaataatggcaatttcaataatggcaaaaatcaccaaagtacggagtatttcttttagttcaaaccagaatgttttccgataaaaataatgccgtaacctaacggcgtaccatcccacacagcaaaatgctaacaaccaatgtaatgcaacccacccctcattttgggaaagatgtgtaatatattcattttggctcgacataaatgataataattcgatcgccaaatagattgagataataaaactaataaaatcagataaggcaagtgccacactgactataaaattcctgctgaggagtgtcatgattccctctcaatatatgtaatcttctatggattttataattaacacagcggattataaacttactgaagaaaaaactagccgagcattaatagctcggcttatgtattttatttatcgtcagtataggaataaccatagtggttataaccatagccataataactgctagcttttttcattacaccattaaggatacatcctttaaccataacaccgctttgttcgaagcgtttaaaactaacttcaatttcctttgtagtattttgttcaaatctggcgattaataaagtcgtgccaacataatgaccaatgatagcagcatccgttacagctaatatcggtggggtatctagaataacaatatcataaatcccgcttgcccagttaataagctcaccaaatctgcgatgcattaacaactctgcagggttgggtggtacggcacctcgcgatatataatcaaaaccggcatttgaaacagttttcactgccttatttaattcagttttaccagaaaggatatctgaaaggccattctcattatctaagttaaataatttatgagtatagccttttctcatgtccgtatcaataaatagaaccttttgtcctgtctgcgctacaacagcagcgaggttagaactcacaaatgtttttcctgcattaggactagcaccagagatcattagaacgttgttccgcgcctccatcattgcaaaatggagactggtgcgaagaccacgaatagcctcgatcgccaggtctgctgggttttctactgctaaaaaagcttgatatcctatttccgtttttttcttcagtctaacagattgctgacttcttttcacaaacgtttctgatacaggtatactagcataaacgtttatacctatctcttctaattgctccgggctttctattccgcgacgtaagaacactcgcagtaaaaccagtcctactgataccatcccacccaaaataataccaacgaataatactattacttttttgggttttactggtttgggttgtgatacagcattatcgataatacgtacattaccaatcgcgcttgatttagctatactaagttcttgctgacgatttaaaagctgcatataaactgcttggccagagtcaacatcacgacttaattgtagtatatcctgctgagttttaggcattgccgaaacacgttgattaagccttgctttttcttcttgtaaagtcttccgcttctccatcagcgctttataggttggatgctcttttgtataaagttgagaaatctcagattctcggaatgtcaactcgttcagctgattatcaacatttactatctgctcaagaaccgattttgcctctaaagaaagatcaattgagtctttttgccggcgatattggtttagtttgtcctctgcaatatctaattcattgcgtacctttggtaattgcacgttaagaaattctaaacttttagcattctgcgctgcctggcgagccacattttgtgcaagatagttattactaatactatcaagtattttttcaagcaacaggggatctgggccacttaatgatagatttaacatcccagtatcttttccctgatcgacgacagagaacatatcttgtaaatctgaaattgcctccagtttacttacatatgatatgacaaattcagtttctggctctgcctctatttgatcgaccttaagagcaataccattcatatccaataaagagccaacctcacctgacatttgcttatcattaaaaataacactgtaatgatttttatcctttactgtcagcttcaggctaggggtatccgatccgccatccgacggtaaataaagacggctaactgtcacacttcccgctctcttgccggttagccgcgaccatcctttaccaaatattgggaaatatttctgttgaactcgggcctgtaaattaaggtcatcaactgtttttcccaagatcatacgagattgaagcaatgctatttctggcgctgactgaggttgactatcaggtaacatctggctaaggctattgagtatcgcatttccctgcttttgttctacctgtaagagcgcatcggcctgatagacaggagtcgcaaatagtgcatataaaagtgcgataagcgtaaataatgcagtaacggatagaataagctttctatgatcgataagctctcctaccaaacgccctaaatcaatttcatccgtctctttctcgacaggtctgctttttactgatgacatgcaatgattcctgatatttatgcgcccaatttctcggcccaacgtaagccagccagttcaatcaactgatataccgaagcaaacgcttcatcacttttccggtatggatcagggatttccttttggtttagccattggccaaacagcattgtttttcctcttgcttcgggagcaatccgaccaatttgttcaagatgagatttttccattacgagaattagatcatattgtcgacctaatgatgaggtaaattgtcgccctttgtgccctgttaatgaaagaccatgtttttctgcaatccttattgcactttcatctgcactatggccaaccaaggcgccagtacccgctgagtctactttcttatttggcaacgtacgccgtaaaaaacgctcaccaattggtgaacggcaaatattgcctgtacaaacaaccagaatcgagtcaaacataatcaattccaatttttaatatagcggacggtttcagtcatatcatgtacaccggttatagtcggtaccagctgtgaaattacacgattccaacgaactaaaggtgctgctgttacaaaaacaatatcatatggttgcaactggaactccgtacccaataccatagcagatgcatcttgtgcatttagctgataaatattggctattttaccttgtttgtcccctttcaattggcggataacaaatactcccgtcgcgtcactaaggctctgtgacatgccttccgcatttcctaatgcttcagcaagtgtcataccactgcgatccattttcatggtgctctgtttacctacctcacccataacaaagactttcaaatcgtcattgcgaggtataaataaaatatcaccaggataaagcaaacgattctgagtgagatcgcctttttgcatcagtgcgtacaatgatattttggaatctttaccattatgagtcagcacaacatttcgccaatcggcatctgtagcaagaccaccagcagcattcactgcatccattattgtcagaggtatattggtaattgcctgctggccagatttggtcacctccccagtaacatatactttctgtgatcggaaagcagcaatgcttacgtccacctgcgggctttcaatatatgttgttaagcgaccagctatctcctgccgtacttggcttaaagttttgcctgcgacctgaaccttgccaatgtatggataaaaaatagaaccatcagaattcacccagttacccgtatcactggcactacgatattgaccagcaggagtagttaactctggatgatcccaaacagtcaccataagcacatcgcccacgccgatacggtactcataacttttcagtaaattgtctaactgcggattcgggcgagccatgacggtttcgggacgaagttggtcaactaagcccggagtcaatggatagacattcaccagtttatccaggtcgtaatcgctatccggcagctcaaccacattcttacgaaggctattcaacccttggcccggcatgattgtacagcccgataaaaaccctattgctaatgccaatgccgaaaatctaacaatttttttcttcataatgtcacatcatcagtaaaccaaaagtttctaattcccaaacaacagcccatttccaaagctgcgtaaaggctataaattaaatgggatttctatccccgcgctcgcacccacatcatcgctatcgctattgtctgcatctgtataccagagagaggtgttcaggcgtaccgatttatacacatccccgctccagcccaattgtaggcctttcaaggtatccgaacgaggaaatgcattattaattgactgattttcgggattgactttcgcatacgctaaacgcgcactccaacgttgattatcctcggtcaccagctcgacttttcctgcaaagagctgaccatcgccccccattgcatcgccgagtgaatatccctgttggtagtaaccatctttgtagatatggtgcgtatagctatagttggttcggctcatattcgtccgggtatcatgagcttccagataccagttgatagcatctttaccccaaccgtgatgcccttcaacgccaccaaggaacatattcgctgaaggtaagaaaccagactcgtcttcaccaatcatctgcccatagacactaaccggccagccaagtgtgggttccagcttcaacttaaagtcaaatccagccaactggttgccgggttcattgggatcgtttgctgctgtattatctttgccggtcagaccatcccaaaaattactaaatgactccggtctcccctccccgccccactgcataatgcgcgatgcgcccagttcaagggactggaaaggagcaaacgtcagacgcccgccgataattttggtatgcggtacggcggtatattgattcatctggctagcggaaatctgatactgccatgggccaatccagcgcagccaccaggtttccggtgcggcctgttcagcacgctgcattaaaacgccggtcattggccgcatcgcatcaccgcggatcaggctgccttcataacccggcccccaccactgcggcatctgaccaaatgagagccactggttccagaacttaaccgcaccataggcgccgttagcattaaaacgtgaaccgttgctgatgcgctcgtcaccttcaacgttaccctgcaggtgcacatcccaccattcgccgctgttattaaaggctaatgataaagagctatccgcaggctgattctgaccaaaaccctgcggcgttccgggcttatccgttgaggtgtagccgctcacacgaaaatccgcttttaaagagtcgaggcgctggttgattcgcgccagaacaacctgttcggaagagtaagagggttttgccttcttaagggcccggttaatctcttcctggctcagcggccaggtcgacaggctgagatgaataacgccacgatcggagagccacgccagatcgttgcgcagttcgttgtcattcatcactaacccggaggcataggcaagtgagctggcagaagtaagcagccctaatgcgagtgcgattcgcgcaatttttatcattgtacaagatccatttaaagccccgtttccgcaagctggtgcgacaaggggaacactggtagatgcagcgccctctgacgccaacctttgctatgtttggtctacaggttttggcccaagaaaacgaaagcatgccgatcggaacgccgtgctaaagctcgttttctactcgcaggctacctgcagtacacaatgtatgcgaaattgttattgaaggctattccatcgcacctcatacccgcagtttatcagcccgcctcaagatgaataggtcctgatttgatgacaactcgctagtatatacaggttgcgaagagaatcacctgcatggagtccactttaggaatttctgtcgcataaaatgagatgtgatatagagaaaaggcctggtcgcaggtacgctaccgcccttggcttaacagctaccaatgcactgtacttctttccctgtaaattcgatcgtagattccgataaatcggcgattaatccatcaaagcaaacaatttcgcggccataagtttacgagattctaccctcaattgggagcgtaatctcacattatcagttacgttgccagcgccacgaaccaattgccgataacgctattgttttctgctcttcacgtaaaaacggaaccagtacaaagcaactgaataatctcaactttatgattttattgcttttttcaccacaaaaagtgtgttgacttagcttcaagttaattatagttagtcaactacaaaaattgatagtaaaaagaagtatgccacgctgttgttatcattaataaattcgatatttagacagaaaacttatttaggaaacatcctggctgattatcattgcgctaattattgcgcagaatgacccagcacaaatttatttcatggatatgaaatatcgccgccactgacactttcttcataaatttcatattgcatacaatgtgaacacgacatgattctttctgaatccttcatcttttccacgtttgtctgaatcagtaaaatcgcttatgcagatcggctcgggtaaaaggtttttccagtgggccaatcttcaccgcaatctcgttcagcaaagattgggttggcgccttcgcccccgtattcagcagaagcgccgggataaccaccatgctcgccagactgccaaaggataaccgcgctgtatgagtggcgcgaacgcgtgactgtagcagcagaaaaattgcgctgcctgcggctcccagcagtaagccggcaatgacttcagaagttgaatgtgcgtggaccatcagtcgggagtagccaaccagtccggccagagcataacccactatgacagcagtaaaacgaagagctggtgtagcacgcgcgcacagcagccataagaggattggccagaaagctgaagataatgcggtgtgcccgctaaagccagtgaagtccagctcgcgaatcccaataccccaacccataaatgccagttttgatgcgcagacaattgcgccggttatgccaaacagcagcgcccagtgccaggccagctgctttgaatcttttcgcagaaaaagcacgataaacaatactgccgcactgggtaacagtacggtgctatcgccaaaaaaagtgacaacctgccagttcatttatctttcatcctttgacgatctctccagttcgcaacgcctttcccgcgacatttgtgtgggcgtatgcaatcgttaaattcacattaatatgcacacgctaccgttgtttaatgcgcaaacatgatctcagtcaagttttattttcatgttacaccttgactaagggctgcttacttaagaaaaatcttagtaagtaattatcagcaaagagtaaattttgcttgtctgaccatttcatcatgctgcgtcttattcgactaccagaagtctccgaacatttgctgcgttcaaaagcgatacactataacaataaaaccagctaactcattgtatttatagggctattaaccagttctacgcgcagtatctgatattgtgaatctgacgttgtgaacggccacgaatcctcttttcgtcatcagataattcggaccgttcactctcacgcgctaataagcactgacgcgaaaactacgccagcagcttcttaatactctcgcggaattttgccccttctttatggttacgcagcccgtagctgacaaaagcctgcatatagcccatttttttaccgcagtcatagctgtcgccagtcattaacatcgcatcgaccgactgttttttcgccagctcggcgatcgcatcggttaactgaatacgtccccaggcgcccggctcggtacgctccagttcagcccagacatcggcagagaggacatagcgccctaccgccatcaggtcggaatccagagtttgcggttcatcaggtttttcgatgaactcaacgattcgggcaacctgccccgccgattccagagagtccttagtctggataacggaatactcggagagatcgccttccatccgtttggccagtacctggctacgacccgtttcattgaaacgcgccaccatcgcggcaaggttatagcgcagagggtcggcgctggcatcgtccagaatgatatccgggagcaccaccacaaacgggttatcgccaatcagcgggcgcgcgcaaagaatggagtgacctaagcccagctgctggccctgacgcacattcatgatcgttacgccaggaggacagatagcctgcacctccgccagaagctgacgttttacgcgttgttcaagcaaggcttccagttcgtaggaggtgtcgaaatggttttctacggcattcttggatgaatgcgtcaccagcacgatttccttgatacccgcagctacaatttcatcaacaatgtactgcaccattggcttgtcgacgatcggcaacatctctttcggaatggccttggtggcgggcaacatatgcatccctaatcctgctaccggtataactgctttcaaactcaccattttcatatccacccgtatggttataaaccttttgatcctgtcagtttgtatgtatcactggcatttatcagtgatgatacacgcttgatacctgccattctgtccgtcaaattctgaaattacacgctgaatttaagaatacacgcaaagtctacataccaatagacagttttaagaaaattcttatacgcatagcttctaaagaatttccatttaattacaatgagttactcaccagcagcaccttattttattcataaggtagcgtaatgacgctcatcgcttctccatcatttctcttttaataccttgtaatctttcatcatgaattgacacagaacaagtgactgcaaaaaaataaaaatccagcccaaataatcaattatattgataataaaattatttaacgtacaaaagcgcctgaattgcagccaattacccgtcacgtctgacttcacggtcagcaatgatattgctgaaaaaaacgacgggcagcccgctgacttaaaccctcttcgctgctgtttttaccgcttgccatcacatataacgctcattacatcgtcctgcaaaaattgatctacggcaagccacgacattaagtagtataaaaatccaaattcaagaaaatcgttgatatatacatcaaatctattgattgactctcgcgttatctaagtaacgtatccgccttctgctgcagagcagcatggtccttcaccgctcgggtgacatctggcttaaaatcgtacgcaccgtctccgcccgtatcgctgaaatttcgcgcgttaattaataagtaccatcccatgggcgcattgtggaaaggttatatcctgcacaactgactcttttatttgttggtttattgggaggcgggttcagggctgagctaattaacagcagaaaatattgcattttatctatagcttatccatgatcgattcatggcactcttaggttgtaaaggttttaactgaatatggaatggattgccgacccctctatctgggccgggctcattacgcttgtcgttattgaactggtactcggtattgataatctggtctttatcgccattctcgcggaaaaacttcctcccgcgcagcgagaccgggcccgcgtcaccggtctgctactcgcaatggtgatgcgcctgctgctgctggcttcgatctcctggctggtcacgctaaccaaaccgctcatgacctggcacgatctgagctttagcgcccgcgatctgattatgctgtttggcggattattcctcctcttcaaagccaccgttgaacttaacgaacggctggaagggaaagatagcgataacccgacccagcgcaaaggcgccaggttctggggggtggtagcgcaaatcgtggtgcttgatgccatcttctctctcgactcggtgataaccgcggtcggcatggttgaccacctggcggtcatgatggctgcggtgattattgccattagcctgatgctgatggccagtaaagccctcacccgctttgttaacagccatccgaccatcgttattctctgtctgagcttcctgctgatgatcggctttagcctgattgccgaaggctttggtttccctattcctaaaggctacctgtacgcggctatcggcttctcggtcatgattgaatccttcaaccagctggcgatttttaaccgccatcgctttctctcggccaacctgaccctacgccagcgaaccaccgaagcggtgatgaatttgttgagcgggcgcaaagacagtagcgaactggatagcgagaccgcctcgctggttgccgatcgcgacgataacccactcttcaatccgcaagagcggcggatgattgagcgggtactgaatctcaatcagcgtaccgtcagcagcatcatgacctcgcgtcatgacattgaacatattgatctcagcgcgccggaagaggagattcgcgccttactcgacaaaaatcagcatacccgcctcgtggttaccggcggcgatgatgacgaggatatgcttggcgtcgtgcacgtgatcgatcttctgcagcaatcattacgtcatgaaccgctcaatctgcaggttctgattcgtcagccgctggtgttcccggaaacgctgccgctgcttcctgcgctggagcagttccgaagagccagaacccacttcgcctttgtggtcgatgaatttggctccgtagaaggaattgtgacgctcagcgacgtcatggagaccatcgccggaaatctgcctaatgaagcagaagagatcgatgcccgtcacgatattcacaaaaacggcgacgggagctggacggtcaacgggcatatgccgctggaagacctggtccagtccgttcctctgccgctggatgagaaacgtgaataccatacggttgccggtctgctgatggagtacctacagcatgtgccgcaggaaggtgaagaagtgaaacttgacggctacgtgctgcgcacgctgcaggtggacagccatcgggtacaaaaagtactgatagtgccgccggcgcaggatgaagatgaactggattatgaagtgtgatgatttcttcgatgaagcatcaaaagccggacgcaggcggttaaccaatttttaagggtctgctaatctgtcggccgggtagtggctatcgccttacccggccgaaaaaagccacacgctcaacgcatccctctttagccgtaggcccgcgcaggcgaagcgccgccggcaattccagaggaatgcgcattgccggcaatcttagcacgatgcgcttcttctgcttttcctggctaacttacagtttgtcgagcagcttcttcacatccttgccgtcctgggtgtttttattgcgttcagcccattcgctgagccgtttcctggcttcatcctgcagctgcttgcggagtatctggtcaacctgcaggctgtagctcagcgtctgccagttaccataaattcgcaaagggatcgccgtctgcttgagcctgtcgatgagtttgctttcgcccttccagccgcccagtacccggacgttgaagagcatatcacaatcttctttcagcaggttgagctcaccctgaccggtcagcgccatcatgtcagattggccctgcatatgcgtcaaggtgaccagcccattattcagcgcaaactcggtgctgacagagtccagacgggtcgcattgtcgtaattttcctgcgcctgaacgttggtgctgcgctcgacggcctgctgtaccagctgctggaagttgagcccttcagtgcgcgtatcagtgagctgcgttaccgcctgcccctgccagctgcggcggaactcgtcggcatcgatcttaccgccggagaactcgccggtcagcgagagcttgccggtgaggtttatcgaataattaaacgctttcagaatcgagccgatctcgacgttgtcaagttgcggctggaaagaggcatgcggcgttgcgccccgcgcgtcgagcgagccggggagcgagagtcgtccaccgtccaggctcccctgcatctgatgaatcgtcagcagcccctgctgattgctgatttcacttttcacctgggtaaagtgcattccccgccactgcagctggtcagccgtcaggttcagccgggcgttaaaaccgcgcagggcgttgtaatcctgctgaatatcgttatccgcaataaccgggcgtagctgcctgttctggctttgcccctgctggttaacgctattatcgccagaggcggaggcatgagaaagcaggctatcgaggttgagcgtgcccgcctgaaggttcagcgtccagtcaggctggtcgcccagcacgacgctgccgttgccggcaatggtgctgccgttagccgttaagttcagcccatcgaagctgagcttttttgcatcctcgacccagctggcctgcatgctggcctggccgctaatcccttcggggggaagctccgcgccgcgaagctgccagttcagttgtgaaatatccgccttcagagaatgaggataatcaccgccctgcacctgggcggagaaggaaagcgccagatcgcgctgatcgcggttcacccgaccagagaaatcgaccgtggcgcgatggctgctgtcctgctccatctgcaaacggatatcgcgcaccgtaacctgctcgccatcttcatgctgaaaaaagagcacgctatcggcaatctgtagcttctggacatcatacgaccagccgcgatcctccggcacctgaggcagcgtattgtcgtgcgggacgaccggagcccccttgctacgcacggcttcggttttggaggtcagctggatcaccgcgcccttcaacatcacctgcttgacctgcagctgatgggagatcagcggcagcagcccgacgtcaaggcgcatattatccgcgcgaataacgggttcttcagcacccggcgcggtcagggtcatgcggcctgagagaatgctgagctgcggccagacgtgccagcgcagcggcccattgagctcgagctgatagccgctacgatccgccacctctttaaccatataggcgcgaaaatcgttggggttgaccagcaataccagcgcggtaagaccggcgacaactaccgccagtaagatcatcagcgtggtcagaattcgtctcatggcatcctcagcaaaccgctaaaattatcaatccttgtcgattcgactcgctaccgcgccctgctggtcgcgatatttcgcatcttcgcggcgattataaggccgcatcgccggcccggataacggctcaaaacttaacgccccgatcagcatccccggacgcagcgccagcggcagcttacccgaattatagaattccagtacgatgcagccggaccagcccggatcgatgcggtgcgcggtgacgtgcaccatcaggcccagacgcgccagcgaagaacggccatccagccagccgacgagatccggcggcagggtgaccgattcaaaggtcaccgccagcgccagctcgcccggatgcaggaagaacgcttcaccatccggcagaacaatctcttcgctcatcacgcgatccagggccgcgctgacttccgctttaggcccgctcaggtcaatgaagcccgccgtgtgcccgcggaaagtccgaaacttatttcccagccgaacatcgaccgtcgcgccgttaatgcgctcaacgggcgggcgcgggttaatggccagacgcccctcatccaaccaggcttctatatctcggtcgcacagacgcatgaacgttctcctttaaggcattgcgcccctacgccttccggggataagggcaaattggcttctctttgcacgttacacaattcgttcgtgttattcaaagaactgactgattttggccttcaatatatcgatggcgatacggttcttaccgccgcgaggcacgataatatcggcatactgtttggaagggtcgataaactgcaggaacatcgggcgcaccgttttctggtactgcgccattaccgaatccatcgaacgcccacgctcgttaacgtctcgcttgatgcgccgcatcaggcagatatccagcggggtgtcgacaaaaatggagaagctgagttcgttgcgcaggcgggcgtcggtcagcagcagaatcccttcgagaatgatgactttcttcggttcaatatgaatggtttccggcatacgggtatgctcaacgtagctatacaccggcaactctatcggctggccgcttctcagcatctgcaaatgctgaaacagcagactatgatccatggagcttgggtggtcatagttggtttttacacgctcttccatcgacagatgaccttgatccttgtaatagctgtcttccggaataacgccgatatgttcatcgccgacctgttcacgtaattcacgatatagcgtactggcgataaggcttttgcccgaagccgatgcgccggcgatgcctataatgacgcactgatgagacgtatcagtcataaatttttgcgacctgattaacctgggaatgtaggaagggtggcggttgaccgccaaacgccgcaattatagggatttcagcgcgtcgataccagtgctaagcgcctcccgggtctattcctcctccggcgaccagccttgcgtataccagatatgcagtaaagcgtacgagcgccaggggtgccagcggctggcatagcgcgcaatccgcgccggcgtcatgccgggaaaacgctgtttaatcagataatcatccgccaggaagatatccggcgcctgccagccgcgcagcgcgaaatagttcgccgtccagcggcctatgccgggcagcgtctgcagctgctttattccggcgtcgatattctccggcgcggagagggggagatcgccgcggatagccgcctgcgccaggtggatcagcgcctccgcgcgccgcaggggcatgcccagcgcctttagcgccagcggatcggcctgcgccagccgctgcgcgctcgggaagagataaaagcccggcgcgtcggtcaacggttccccgaatgcggccaccactttcccggtgagctttgccgccatggccacgctcaccagctggccgagcaccgcccgtaccgcttgttcaaacgcatccagggagcccggcagacgaagccccggccttggcagcgcaaggcttcccagcgtcagggcgatctgctgcgggtcgcaggacaaatcaaataagcgcgcaacccgcgccaggcacgactccgcgaccggctgcagcccggcggaaagcgtcacccgcatgccctgcgcggcgtcatccggcgtcaccgtgatgagtccggcgtggccattcagggcgaagctgcggcaatagctgtcgccggcaaaagtttcaattccctgcaccgtacgcgcgccaagaaaatgaaacatccattgccagtcgtagggggaatgccagggtagcagcgtcatcatttctccttttttagcgcttcaatcatagcggctccgcgccgcctgcgccttgcttttaaattccagttgtcgcagtgccgtcaatccgctaaagtcgccccccttcttcaccggcatggggattttgcaggctatgtttattggttttgactacggtaccgctaactgttcagtggcggtgatgcgcgacaatacgccgcagctgctgacgctggaaaacggcagttcactactgccatcaatgctttgcgcgccgacccgcgaagcggtcagcgagtggctctaccgccatcacgacgtcccgcccaacggtgatgaaaaccaggcgctgctgcgtcgcgcgataagcttcaaccgcgaggaagatatcgacgtactcggcaacagcgtgcagtttggtctcgcttcgctgcatcagtacgttgaagatccgcaagaagtctacttcgtaaagtcgccgaaatcgtttctcggcgccagcgggctcaagccgcagcaggtagcgctgtttgaagacttagtgtgcgccatgatgctgcatatcaaactccaggcgcaaacgcagctgccggaaaccatcgaccaggcggttatcggacggccgattaacttccaggggcttggcggcgatgatgccaacgcccaggcgcagggcattctcgaacgtgcggcaaagcgcgcgggctttcgcgacgtcgtgtttcagtttgagccggtcgccgccggtctggatttcgaagcgacgctgagtgaagaaaaacgcgtgctggtcgtcgatatcggcggcggtaccaccgactgttcgctgctgttgatggggccgcagtggcgggaaaaagccgatcgccagcaaagcctgctcggccacagcggctgccgcgtcggcggtaacgacctggatatcgccctggcctttaaatgcctgatgccgctgctggggatgggcggcgataccgaaaaaggcatcgcgctaccgattctgccgtggtggaatgcggtggccattaacgacgtgccggcgcagaccgacttttacagcgccgccaacggtcgcctgcttaacgatttgctgcgcagcgcccgcgatagcgaaaaagtcgcgctgctgctgaaggtctggcgtcagcgcctgagctatcgcctggtgcgcagcgcggaagagagtaaaatcgccctttccgcgcagccgagcgtcaacgcggggctgccgtttattagcgacgagctggcgacagccatcagccagcagggtctggaagctgcgctggatcagccgctggcccggatcatggagcaggttcagctggcgctggataacagtaatgaaaaaccggacgtgatttacctgaccggcggcagcgctcgatcgccgttgattaaaaaagcgctggcggcacacctgccgggtattccggttgccggaggcgatgattttggctcggttaccgccgggctggcccgctgggcgcaggtgatgtttcgttaaacatccgctgcgttcccgcaccacagaacgcagtgaatttgtagcccggctcagcgcagcgcgagccgggctaaatcttcccgattgccgtcacccttcacgccgcgaaacgtaatcccgccgcttttcgccggtataaatctgccgggggcgataaatattcagcggcgcttcgtgcatttcgttccagtgcgccacccagccaagcgttctgcctacggcggtaatcgccacaaacatcgatgaaggcagccccatcgctttaaggatcaccgcggtgtagaaatccacgctcggcgacaggccattttcaacaaagtaggggtcagtcagcgccacctcttcaagggccatcgccacctgtagcggcatatcggacatccccagttccttcagcacccggtgacaggtttcgcgcaaaatagcggcgcgcggatcaagatgacggtagcgagagttaccgaatcccagacgacgaaacgcctgcggatcgcgtttcgctttgctcagaaacgccggaatttggtcgacggtgttgatctcctccagcatccgcatactggcttcgttcgccccgccgtgggccggtccccataaagaagcgagcccggcggcaatgcaggcaaaaagattcgccccggaggagcccgccgcccggacggtggtcgtcgatgcgcactggccgtggtcggcgtgcagcaccaggatctggttcatcgcctgctcaatcaccggattcagctgatacggctccgccgggatagcaaacagcatatgcaggaaattccccgcgtaggaaagatcgttgcgcggatactgcgccggttgctcaatagaaaacttatagctcatcgccgccagcgtcggcattttcgacagcaggcgggtggcggccagcgcgcggtgctcaggattttcaacgtccagcacatcgtgatagaacgccgccagcgtgcccaccagagcgcacattaaggccatcggatgcgagtcgcgccgaaagctgctgcacatgcggccaatctgctcgtgtaccaggctatggcgggtaatcgtgtttttgaacgactgatagctggcttcgtcaggcgcatcgccccgcagcagaatccaggctacctcaaggaagtcgcactggcgagccagctgatcgaccggatagccgcggtgcagcaaaacgctgttttcggtatcaatccaggagatggccgacgtacagcctgcggtgttagcaaaaccggggtcgaaactgcatatacctgcggacgccagcggacgaatatccatgccgggatagccctgcgtccctgagaccgtactcaacggaatggactgttgttcatccaaagacagcgttagcgatttcgtcgtcatcctgtcaggtctccttgcacaacgagtgaatgatttacctggtcatttttccaggcggaataaccaacataaccacagtcgtccgcggattctttgatgtaaataaccaaaacattgataaaggaccgctattacgggtggggaagaaacagaaaatcgccctttcaaccgcataaaatacgcttaccccgaaattaccctcatctaaattctactatcacgccttagaatactgattttatttcatcacaggtcaatatataaccattttatttttttgcccgcataaatccgctactcgtacgcggtgccatggactgccggtgtcagttttttatcacacgctcgtcggcggtcttttatgagggtctgtgcgaccggtcatcccatcagccgcggtggattcatcgccaaatgcgcctcactcgccgcagatattgtccgttatcgttatttcagcgtaaattaaacttgaatataacccgctgcttttatatgcgctgattaaataatctaatgccaattttatatagctgtcgcgtcaatttatggcataacatcataaactcgtatgctgcgcctgaactttcaggttgcttattatgcacctcccccctactttaacgttgattgagaatcttcttacagcaggtctggccagttacccggcgtgcagataacgctggaataatatcttcggcaccagcagaatgctgcgttgcccggtcctggacgtttatttcccgaatgcggaggggtacctgtgcctgcggcagcgttcctctgcgtttataccgtctgattgattaatccatgccacaagggggcgtgattgaatcgtttgtgcgctttttatgatcttattcgcaggagccgcagcgcgcatttctgggcatggtgcggcgtcattatcgctctgcagataggggtgccagcccgcgcggaggtccgccagctgggtattgatattccggtctactggtacgccgacgccagcgacacgctgaccctcaacgcctttctttcactccctgaagaggtgctaaaaacggcgccgcttatcccgtcgttcggctactcgacaaaggcctactggctacgtacttcgctcccggcggccttatttgctggcgaacagcgctggctgcagctcggtccgtcgtttgtcgatcgtttgaccgtgttttatcgcccctacggcagcgacagtccatggcgacagaaagagtttggcgaccatgcgtctgcccgggataacgatctcgactaccgcgaaagcgttctgattttgccgcccccgccgacggcggctggctacgagatggtattccgtctccagagcagcagcaccctgattctgctggcgacgctctcctcgccgcaggagttcgtgcgttcggccacgctcgataccgctttctggagcttctattttggcctggcggtaattgccagcggcatcgccctgtggcttgccatcgcgctgcgtcggcgcctgctgtgggggatctgcctgttctcgctaaactatccgctcgtcgcggccctgcatggctacccggagtggttatttggcagcgccctgctgccggttcaggattatatgatcagctgcctgtcgctagtgagctacgccaccgcgctgtggctgcatagcgaagttttcgatctcaagaaaaatatgccgcggctgcatcaactgctgctggcggcgatcggtttaaacatcgttctgcaaatcagtattccgctgggcttttacggcctggcgatgcagatagaggccgggatattttttatcgccgcccctattctgttaatcacgtcatggatgctgtggcggcgcaaagcgattgatatcaatacgctgctgctggggctgctgccgccgatatatgtcgtctccgccgggctggcactgctctctatccacggcgtcattccgtttcataatggggtctattccacctggcagtacgcgctgattattcatatcgtcaccgtcctgatcatcgccgtactgcgggtgcgggcggaaaaccggactctggtacgcaagcagcagctggcgcgagagctacagattgaacgcgaggccagcttccaccagcgccagtttatgggaatggtggcgcatgagttcagaacgccgctggcgatcctccaggccgcgctggaaaacctgcgcctgtgccccgcaacggtgacgcagagctcgcgcctcgaccgcatgcagcgggcgacaacccgtctggtacagcttaccgataattgcctggccgacgcccggctctcctccagggacctgcacgccgacaggcaggatgcagcgctgctgcccgtgatctatatggccgcgacggtcgtggatctttcgcttaaccattatctggatgtcacccttgaggggcaaactgtgggtccggactccccttcaccggtgctgtttattgatagcgggctactgtgtatcgccatcgccaacctgctcgacaactcggtgaaatatgccgcctccggggagataagcatcgagatttatccgcaggaaaaacacgtggaattacgcattggcgatcgcggtcccggcatcccgcctgaacaggtcgaacatattttcgagcgctatcggcgcggcgaaacggataccgcaacgccggccgggaccgggcttggcctgtatgtcgcccgacaaatcatccaggctcacggcggggacctgtggctggcagagaacacgtcggccggatgcaaatttgcgctcacgctcccggttaacggacagcagaaggacacatcatgacattacgcgtcgcaatcatcgaagatagcgctgatttactcgacgagctgctggcttttctgcgccatcgcggcttcgatgcctggggcgtgcgcagcgccgaagccttctggcggcagctgcatcgcgatccggttgatattgtgcttatcgatattggcttgccgggtgaggacggctttagcgtgctggactatttgcacgaaattggccagttcggcctggtggtggtgaccgccagagggcatgagcaggatcggctccaggccttaaacgccggcgccgatctctatctcatcaagccggtcaacttttccgacctagcggagagtattcaggcgcttggctcccggcttcgccagcaaaaaccgacggaacgcgtcaacccgccgccatcagcagagcggccagcgccgtctcactgggtgctccagaacgagcaccttgtggcgccgtctgggctggccctgccgctcacgcagcaagagtaccgactgctggaagtgttaatgcgtaaccgcaatgaggtctgcagcaaggttgacctgcacacctctctgtttaccgatgaaggcgaaccggaactgcaccgaatcgacgtcgtgatcagccgcctgcgccacaaggcccgccttcacggtatcaccctgccgattcgcgcgatttttggcaaagggctggcgtttctctcctgacctttccccggccggcagcagcagcgctgccggtcagtattccgccatccgcgcggcgtcattgcgaagttgttttcagttttgctcctcttgttaatttttttcagtttttgagaggaatgagagaaatgagactgacagcacattaagaattttcttacattgacatggtgtcgtgagcgtaccggcccaaagcgtccctgagcgaaccgactattgctgatccagcgatagctgaattcaggacgcttgccgcgcgcttttcgtacgcgtatcgcgagcacggtttaaagaagagtataaaaatattcccgtgccggcgaggtacatttttaacacctaaaattaagttaaaggatatctatcatggccatgcaaacatggttagccttattgctgtgcatattttgcctttgcgtgtctgtttacagccttgtttcctatatcagagacaggagaaaacaaaaatttccgttttcaactaagaattcatcgcgcagaaaataactaaagccccgcgaataataaccaaatctgtccagcagcagccaccgcatacgcccggaggattgatcacaacatggcgttatgttgatttatcagggaaataacgccatgaaaaaaataaacatcgctatcaacaccaggaatacttttctccgagagtcgttggttgccatagtcaatgagctcatcagccgcagcggcaaccttaaagccgctttttcttataagcataatgattttttagataaggatatcatcatcgctgaagttcttcccggcgagatctatctgtgcaataccagtattaagaaccgtaaaaaaacagttcggtgattatattacacagctatgacaaacttccggaaaaggagctgatcgtcaactgccttaagggcgttacctttgtctcaatcaaagccgttaatatcgataagatgtttgaaattattgcccacgagctgaaaagaagtgaactgcttcctctgacgcagaagatcgactcgccgctaatttgcacaaactgcccgcataagatgttgtccaaatcgcaggtagccgtcgccaccggcattattcatggctttgatatcggtaaaatttctgctctcaacaaagtcactcccaaaaccatcacctggcacaaaagcaaaattatggaaaaatacagccttaataacaattatgactttttccagtttattaacttattaaaagaacgctggtaaacgcgcgcacgcgccatcgacgatcggattatgtaccgtaaaattaagaatttgctggcttgcgaggaacgggattccgaaaaagatcggtaaaatgaaaaacatctactcaggcgttacgggcagcgggtaacatgacccggttccctggtatgaaaataccggagcgtatttttatacaataaaaaatgcctctaccagggaatctgttacttcgtcacattgcccctggcgtgcctgtcaggggcctctttttctgcgcaaaaagcgaccccgtcagagaggccgcccgacgatcaggcttgcgcctgctgagacgcgacttcagcctcgggtacctcattctgcgacagaccttcattttttgacagcatcgccgtcgcaatcccgttacccagcacgttaatcgctgaacgccccatatcgaggaaatggtcaatccccatcagcagcaaaatacccgccaccggaatattgaagctcgggatggtcgccgccagcaccaccagcgccgaacgcggtaccccggcaatccctttcgaagccagcatcagcgtcagcatcattacggtaatctcgctaaagctcagctgaatattgtaagcctgggcgataaacatggcggcaaaagagcagtacaccattgaaccgaccagattaaaggagtagccaattggcagcacaaacgacgcgatattacgcgagcagccaaattccaccagacgctccagggtcttcggataggcagcctcggagctgctggtcgtgaacgccaccagcaccggatctttgagcatattcagcaggcgaaaaacctcttttttgagcaccatataccccaccgccagcagcaccgcgctggtcagcagaatcgcgacatagtatccgccgataaacgaggcgtaattaagcaggatccccagcccctgcgaggcgataaccgaagagatcgcggcgaaaatggccagcggcgcgacgtacatcacgtacccggtcaccttcagcataatatgggaaaccacgttcagcgccgccaccagcggggcgttgaatttctcccccagcgatgccccggctataccgaagaacatagagaagaccacgatttgcagaatctcgttgttggacatcgcctcggtaatgctggtggggatggtatgggtcagaaagcctttcaggctcatcccactcaccgccagcccggtatccacggactctttcgggatcgccaggttcaaaccggcgccgggatgctcgagggtaacaatcaccagcccgaccagaatggagagaatggacgaggtaataaaccacaccatggctttaccgccgacccgcccaatggtcgccgtttcgcccagccgcataatccccaccgtcagggtactgaacaccaacggcgcaatgaccatcttaatcaggcgcagaaacacgtcggtaagcagcgtaatgttttccgaccatgcggtaatagtcgtttgcccggcgtaagcgtggatggccgcgccggagaggatccccaacagcatgaagatgacgatgaacagcgtgagtttgtttgcacttgccacaaaaattaacccctgatttatttaacgtgttgttttttaatgtatatatgttttatttattggaatacattaaacattcaccacataaattgaataaaagcaggcggggttacaactcttttttagtttttatagtaaaagttaatgtgctcgttgatgtgcatcaaaccgtgccgcgccgccggtaagatgaaaaaggcgccggcgtcagaagacaaccggcgcaaagaggcattagtgttttacggtatcctccaggaagaaacgtcccagcggattctgataaaaaccatcgatatttttgcggctgacgttgcggtacgggctgtaatacagatcgacccagttcacgtcggccttggccattttttgcaggtcgatatacatctgctcgcgctttttactgtccatttcaacgcgcgcggcggccaccagcgctttaacctggtcgttatgatagcgggtcatatagttcatattggcatcgtgacccagcacgaaggtggttttctgatcggggtcgagaatatcgttggtccagtacatcaccgatatatcgtactccccggccaccagcatatcccagctctggctcgggtcgactttttgcaaattcaccgtcaccccggcttttgccagctgctgttgtagcaaaatggcaatttgctcatcgacttcatccccggcattgaccacatagttcagcttcaggtcggcagcacccgccgctttcagcatcgctttggccttttgcggatcgtatggccggcgaagattatcctgatagtggtaaagcgctccggcgggaatataggaattggccacctgaccgtagccaaaggtcacggtttttacaatcgcgtctttatcaatcgcgaagtccagcgcctgacggacttccaccttgcccagcgcgccgtgagaatgattgatcagcagatggtcctcgcgagtagaaggatccagctccaccttcagattggcatccttttgtaacgatgcaatgcgcgagaaaggcacggtcagcgcggcgtcaagttcgccggcctgcactttcagcatgcgggtattgtcgtccggaatggttaaccactccacgccatccaggctgacgtttttcgcctgccagaagttcgggttcttcaccagcacgatcttttctccgcgcagccactctttcacgctaaacgcgccggagcccacgggcttttcggcaaacgcctcttcgccttccgccttcatcgcctgctgggaaatcaccgaagcgttcggcagcgccagctgcgataagaacggcgctgaaggcgatttcagcgtcaccaccagcgtgcgcgggtccgtggcttccgctttggcaataatgctataggaatcccgccacagcgagccttcatcatcgcggatacggatcaggctaaacgccgcatcgctggcggtcagcggcgtaccgtccgagaaccgggttgcgcgaattttgaaggtatagactttgccatccggtgaaatcgtccagctctcggccacgcccggctccagcttcgtcccgcttttatccacccgcaccagcgggtcaaagacgttggaaaagacccagttatccgcattttgcgccgattttatcgggtcaaacgtggtgctgtcctcccggcggccaatggtcaatacgccggccgcctgagctatttcactcaccacgctgagcgccagaaaaacgctcgccgccagtaacttaatctgcctgtgcttcatcaaaagatcccccagttaacggaaaaacggtctcatcgcccgcgaggttgagcacgcaggcataagcgcgatcggcaatctgccgggttggtggtggtgcgccggtgcggcactgcacctgcgcataagggcagcgcggatgaaatgcacagccttgtggaacggctacgggactgggcggctcgccccccagcaaatttttcggcagcggtttatccgggtcgatttccgggatcgccgagaccagcgcggcggtatagggatgcagcggtcgagtgaagaccgcttctgccggcccctcttccacaattctcccaagatacatcaccgcaacgcgatcgcagagccgccgcacaatcgccagatcgtgggcgataaacagaatcgccagccccatcttttcccgcagatccatcagcaggttgacgatctgtccctgaatagagacgtccagcgccgcgacgcactcatcggccacgatcagccgcggctccatggccagcgctctggcaataccgacgcgctggcactggccgccgcttagctgagacggtttcgcgctggcctgctgcggacgcaggccgaccagggtgagcagttccgcaacccgcagcgcttcctgcccgcgcgggactttctgatgcacgcgcagcacctcggagatgctttctcctacggtctgccggggattcaacgaggcatagggatcctggaaaatcatcgcgctttgctggcgcagacgggcaatatcgctggttaagccatgggtaatgcgctgtccggcgaaccgcacctcgccatcggcaacccgttcaagctgtaacagcgctcggccaagcgtgctcttaccgctgccggattcgccgacaaggcccagcgtctcgccaggaaagatctgcatcgtgacccggtttaccgcgtgtacgacccgcttcggccgccaaaggccgccggaaaccgggaaggtgacgcaaagattatcggcctcaagcagcggccagcgagcgttaaccattatccctcctgccgtgctggcaaaatgtgatggcaggccaccgcgtggctatggcaatcctgcccgtaacgcagcaatggctggctctgacacgcctcatcggcgcggcggcagcgcgggtgaaagcgacaccctgatgggaagtggtcggcgctgggcggctggccgtcgatgatcgtcaacctcccctgcccgccttcgctggccggctgacaatcaatgagcccgcgggtgtagggatgcaggggcccgccaagcacttcgcgtttgccgcccacttcacacagcctgccgccgtacatcaccgcaatccggtcgcaggtttgcgccaccaccccgagatcgtgggtgatcataatgaccgccagccccagctcggcgcgcagatcgctgagcaggcgcagaatctgcatctgcacggtgacatccagcgcggtggtcggttcgtcagcaatcagcagccggggttccggcgcgagggcaacggcgatcatcgccctctggcgcatgccgccggaaaattcgtgcggatagctattgagccgattctgcgggtccgggataccgacctggcgcagcaaggccagcgcatcctcccgcgcctgacggcggtttgccgcaaagtgaaggcggcgactttctgcaatctgctctccaatggtcatcaccggattgagatggctggtcgggttctggaaaatcatgccgatttcccggccgcgcaccgccgacatttgcccttcgctgagggacaagatatcccggccgtccagcagaacctcaccgccggtaatccgcagtccggcccccggcagcaggcgcatcagcgcccggcaggtcacggttttccccgacccgctttcgccaaccagcccaagcatctccccggcttcaagcgttaacgagacgttatccaccagcgcgacatcctcgccgcgcatgaccgtcagctgatttaccttcagcaagctcatacgcgttcccctagcttatcgcccagcccatcggccagcaggctgaagcccatcgccagcagcacgatggcaagccccggaaaggtggttatccaccatgcggtggtgataaagctctgcccttcggccaccataatcccccattcggcggtaggaggctgcacgccgagcccgagatagctcaccgaggccccgttcagcagcaccagaacgcagtcagacatcgaaaaaattatggctccggttagcgcattgggcagcagatggcggaacaaaatccgcagatggccgtagcccagactgcgggccgccagaataaaatcgcgctgtttcagcgtcagtacctgagcgcgtaccagccgggcgtaggagacccagcccaccatcgccatcgccatataaaagctgctcagccccggcccgaggatggcgataatcgccagcatcagcaccagaaacggaaaggccagcacgatatcaataacccgcatcaccagcgcgtcggccacgccgccgagatagcccgccagcgcccccagggtggtgccgagcataaaggggaacaggacccccagcaggcagatttgcagatcgacccgcgccccccacagcacgcgggaaaaaacgtcgcggccaaagttgtcggtaccgaagagatgcgcgccgcccggcggcagcaggctggaagaggcgtcctggacaataggatcgaacggcgctatccacggcgccagacaggcgaccagtagccatagtccgactatcgccagcccggcgaagagcgcctgctgacgcgggatcgcccgctgacgcaggcgggaaaaggtcgctatcgccttcatagttttatccttgggtcgagggccacggtcagaatatccgccagcaggctgaccgccacggtggcaagggcaaagaccattaccacgccctgcaccaccatgtagtcgcggctaaaaatcgccttaaccagcagctgtccgaggccggggatagcaaacacgctttcaatcaccaccgtactgcctataagccagccaatattcaccgccagcagattgatggtcggcaccagcgagttcggcagcacgtgccgccagaagatacgtctttcctgctgcccgcgcgcccgggccgccaccacatagtcgctattcatctccatcagcaggctggcgcgcaggttgcgaatcaataccgccgacagcgccagcgccacggtcaggcacggcaaaaccatatggtgcagctggtctaaaaaatcgctgccgtagccggagaccggaaaccagccgagcacgatactgaacagcagaatcagcatgatgccgagccagaacgccgggaatccgagcccggcggtcgtaaacagacgaatcaaccgatcggcgagacgcccgcgctggcgtgcggctatcgccgccagcggcaccgtcaacgctactgccagcagaacgctgccgagcaccagccacagcgtcggttccagccgcgaggcaatcagcttcagggtatccacccggtatacaatcgacttccccagctcgccctgcagcaggttgcgcagaaaatagccgtactgaacccacagcggttcatcgagggcaaactgcgcgcgaatgcgggccagcgccgccggcgtgctgcgcacccccagcagaatacgcgccggatcgccggggatcgcgcgcaccatcatgaaggtgatcaggctgatacccagcagaaccggcagcagctgtagcgggcgaaaaagcagaaagcggtaacgatgcattaacagcctcccgcgtcgcgctggcgtgccagaaaatcgagcagcaccgggtagtaagcctgcggctcttcgtaaaacggcatatggctgctgttggcaaaaatggctatttcagcgttcgccaggccctgcttcattttcagggcgcaggcgggcgtcagttcatcgtgctggccgctggtgatcaaacagggcacgcggattgacgccagctcagcgctgcggttccagttttttaaattaccggtatagaggaattcgttcggcccctgcatggtgatatacgggcccatattccagtccccaagcgagcgggtaaccggctctggccagacgtcaagacggcacacgtgacggtaattcagcagcgtaatcgccgcctgataggctgggtggtctagccagccgagcgcttcgtagcgctgcatcatcgcgacggtttctggccccagcgccccgcgcagacggttcagctcctgcaccagatgcggcatatcggcgacggtgttttcaagaatcagcgagcgaattgcgccaggatggtgcaatgccacttcaatcgccagccatccgccccacgagtgaccaagcagatgcacctgaccaaggcccaaagtccggcggacggtctccacttcacgcacatagcgcgccatcgtccacaggctggcgtcatccggccggtcggactttccggtccccaactggtcaaaggcgatcacccgatagccgtgctgtttcaggcaggcgtgggcttcgcgcagatagtcgcagggcagccccggtccgccgttgaggcagagaacggtctcatcgccgtcgccaaactgataggccacgacgttatagccttccaccgcaatgttatggcaccggtcgggcgctatttcgctccacatggtctattcctcatcgtcgatggtaagagggttggggtctgtcttaacgctaacggcaaccccggacgctgaacagttagcaaaaatactagttttgcgctgcgccgggacggcaccggaattgcatatctttgggccagctactgacggatttgcacaaatcgtgcccgtcgcaggtctcgttttaggtgaagggggttatatgcgactggagtttgaccaccccggcagcgcgcgggcggccagcctggatgacgcattcagcgggctttttcagcacacccggaggttgggatttgaggcggtgatttacgattacacgccggttccgcgttctctggaaggagaactgattacgccctcgctgctgaaaacgttcaacgtgccggaagatatgcgccagctatggtgcgagcgcggatattaccaggtggatccggtacagcactgcgcgctcgagagctgcgcgccttttgtctggtcctatcaacggccggacagcagcatgctgcgcgggaggctggacaatcatcccaccgcggtcaccgactatatgcgcgaacacaatatgccctgcggcgcgacggttcccctgcatctccccaacgggggattcgtgaccctcaccggcatccataccggccagcgccaggagcgggaaatcagcgccaccctggcgcagctgatgctgctcgcctggcagtttcaggagtccgccttcccgctgttcgacagcactatgctcacctgccatcacgtcaagctgagcaaccgcgagcgcgaatgcctggcgtggtccgccgaggggcttaccgccaaagagatcgcccgcaagctgcatcgctcggtggcgacggtgacgctgcatctcaataccgcggccaaaaagctgggcgccagcaaccgcgtgcaggcggtggtccgcgccctgcactaccgtctgctcgacagctaagaactagcatttttgctagtgttcagccgcggttgccagcctttaccctgaaagccggtccacttagcagggtaaagatgattcatgtataccatccgcgaaggttacgccccgtttcggcactatcaaacctggtttcgcgtttgcggcgatatcgatagcggactcacgccgctggtcgtcgcccacggcgggccggggtgcacgcatgattacgtcgatgcgttccgcgatatcgccctcagcgggcgagcggtgatccactacgatcagttaggcaacgggcgttcaacccatttaccgcagcagcccgccgacttctggcaaccggcgctgtttcttgacgaactggctaacctgctgctgcatctcaatattgccgataattacgccctgctcggccaatcttggggaggtatgctcggcgcggagcacgccgtgacgcagccaaaggggttaaaggcgctgattatcgccaactccccggcatcgatggcgctgtggctgcagggtgcggcaaagctgcgggcgcagctgcccgccgacgtccagcagacgctgctggaccatgaggcggcgggaacgctggacagcgcggaatataaggcggcaagcgcagtattttatcaacgccacgtctgtcggctcgatccctggccggcggaagtgcggcgcaccttcgacgccatggatgccgacccgacggtttatcacgccatgaatggccccaccgaattccacgttatcggcagcatgaaagcgtggacgattatcgaccgcctcgcgcgcattacggttccggttctgctgctttccgggcgctacgatgaagccacgccggaagtggtacagccctttatggaccatatctccggcgccgagtgggtcatttttgaagcctcgagccatatgccgcacgtcgaagagcgcgagctgtgcatgaagacggtgaacgactttttaggccgggcgataccataaaagccgcttacagcgccagtccgcctccgccactgaagggccgctcgccggcgattttcatcacttcagcccctaaagtgacaaacggcgcccgacggctggcataaatcaggccgcccgatgtcggccgcaccgctttgaccatatcggtcagcggatcgatgatttccgcgacgacatcgtcagcgctgacccactcgccgggctgttttagctgcaccaggatgccggtcgccggcgcggtgacaatctccccggcggcaaacggcagcatcaccgtttcctgctgcggaacctcgggcctggcgcccgccagcacgccgcggtactgcaggtaacggtaaatgcgttcggcgtcgtcgcaggcggtggcgtgattcacctcctgctggccgcgcagctcgacggtcaccgccatgcagccgggctgctgctggcgccacgacggattcctcgcgcaaagacgctgccacggcaggccgcaggcttcatcaaacgagttgcccccgctctcctgcgacagcagcacggcgccaataccgaggaaagccgccagaactttcgcctcgcgttgccaggccgggtcggcgtagaggtgcaaaatcgcctggtcatcgcagtgcagatcgagcaccagatcggcatcgcaggcgaggctcagcagatggtggcgcagggcctgcgcctcgctcacggcgggaagcgccgccagcgcctcccgcatcgccgcgcgcacccgctgcagatactcggggcgcgtaccgggcaaatccgccggtaaaccggcctgcgccagcgccgccagatcgggaaaatcgcggttaaaattgcgcccgctcgccagatcgaaacggccaataccgctgctgagcagcacctgggccagccccggcgggttggctaccggcacaagaatgatttcgccgcgcagttcgccgcgccgttccgcctggctgagtaatcttttaagataatgcagaaccagcatgcccgggatttcatcggcgtgcagccccgcctgcagatagaccttctctcccgtgccgggcgcgccgaaatgaaaatggcttaattgccgctgcccaccgagtgcatgttcaggtaatgtatagtgtttaattttcattggacgtcctggttgtggaaaagaaagcccggcttgaccgtatcgatcataagatccttgaaattctgcgccgggatggccgcatttcttatcagaagctctcggagcaggtaaacctcaccgcccgtccatgcctggagcgggtgcgcggcctcgagcgcgacggcattattcgcggctacagcgccattgtagaactgcccgagccggagcacgcgtttgtggtacaggcgcaaatcgcgctggccgaccacgggcgctcgcagccgatgtttgagcaggagatgcgccagacgcccgaagtgctggactgctggctggtcagcggcagcttcgactttctggtacgcatcggctgccgcagcatggcgcactactgccagctggcggatagctggctgaccagtaaaaagtttcacgtcgataaaatcgtcaccctgaccgaactgcaggccattaagcgctcctgactagccgcgccggataaacgccagccagcgccgctcggcgcgggaaaaggcgaaaatcagcataaaggtgcagagcagatacagcgccgcggccatcagaaacggaataaacggcgaataggtcatggcgtagaacgcgcgggccacgccggtaatatccagcagggtgacggtgctggccagcgacgtggcgtgcagtaaaaagaccatttcattattcagcgccgggatcccgcgtctgagcgtcgcaggcagcaccagacgacgaataatctgccatttccccatcccgtaggcctccccggcgacccactcctggcgcggaaaggtcaccatcatccccgccaggagctccgcgacgtacgcggcagtgttgaggaccagcgccagcgtggcgcagaaggtcgcatcgcggaacaacagccagaacggctggtcgttcatccagcccgtctgcacgatatcgaactgcgacaggccgtagtaaatcagcatcagctggagatagagcggcgtgctgcggaaaaaatacgtaaaaccacggatgggcagcgccagcgcgcgcggtccatacacctgccccaccgccatcgctatcgccagcgccatcccgggaacgatggagagcaaaaacagctccgccgtgaccgccagcccgctggcggcgccgttgccgtcgctccacaaaaagctcgggatcgcatcgagaaaggtttgcagattcataaggccgtccccgccgtggaagagcgcagcgcgtaacgcttcgccaggcggctgaaaagccagctggagagtgcggtaatcaccatgtaaatcagcgagaccagaaaatagaagaggaacggcttttgcgtggcgcgcccggcctgttcggccagccataccatatcctcaaggcccaggatcgacaccagcgccgatgctttcatcagccccagccagttgttgttgatgcccgggatcgcgaagctcagcatctgcggcagcatcacccggcggaacaccgtccacggccgcatcccgtaggcctgcgcagcttcggtttgcccgcgatcgacggtcagaaaggcgccgcgaaaggtctcggtgtaataggcgccgaaaacaaagccgatcgccagcacgccggagataaaggtattgaagcgcaccggcccgagccccaccagacccagcagcaggttcaccagcatctcgccgccgaaaaacagcagcagcataatcaccagctccgggataccgcgcaccagcgtggtgtaggcggtggaaaacaggcgcagccacggcgggccaaagagcttaaccagcgagttaatcagccccagcagcagagcgaccagtaatgaagagagcatcacgcacagcgaaagcgccgcgccgcgtaacaacaggggtaaatagtctgcgaccatattcagccttccgcggaggtcgtaaaggggcgcaggccatcacccgcgcccgcatcttcacgacttatttgccataaatatcaaagctaaagtattttttctggatcgcgtcgtaggtgccgtcggtgcggattgccttaatggccccgttcagcgcatcgcgcagcgccgggttgtctttattcaccgcaatccccacgtcggaagagatgccgccgtcctggataaccggaccggcaaaggcgaatttctgcccgcgcggggtatcaataaagccggtcgccgcctgaatattatcctgcaacgcggcgtcgattcgcccggagagcaggtcgaggtagacgttatcctggttagcgtaaccgacaatcttcacgccatgattggcccagttggccttcgcaaacgcttcatgggtggagccggtctggacgccgacggttttgcctttcaggctggcgacgtcaggcatcagcgggctgcctttgcgcgccaccagctgcgccgcgctgcggtagtagcggtcggtgaaatccacttcctttttacgctcatcggtaatattgagcgaagcgataatggcatcgaacttatgcgcgttgagggcggcaatcatgctttcgaacggctgcttcacgaaaacgcatttggcttttagctgggtgcacagcgcattggcgatatcaatatcaaagccggtaatttcaccgctgggcgccagcacgtcaaacggcggatagccgccatcgacgccaaagctgatggtgtcaaactgctgggcggccagcggcgcgctgagcgccatgcaggccagtagtgcggcaaggcgtattttcatttcgatctccccggtgttggcgcggtgattaaaaacgcagtgagaggcaggtcaggccgccatccattttcttaaattcgctggtgtcgagctgcacgataggcattcccagcttgctgatttcgcccagggtataggggtagccctgcggcgtaattaaggtatcgttgatccacagcgtatttccggcgtaggcctcctcttccgggatcacgatgctgttgaagccgctaaacgccggatggctaacgtagccttccgtcagcagcagcgtattgcggcccacatagttgacgatcgatttcagatgcagaccggcgctcacttcaatcgccgcgacctgatagccgtgcggctcaacggcggcggcaaactcgcggatcccctgctcatcggtgcgcgccgtcaggccgataaaaaactgcttatccactaacagcacgtcgccgccgtccatatgcccgcgctcgctcattcgcgccagcggacggaaccccgccagcaccggcgcaatggtatcgacctcgccctgacggctcggcgcgcccggatgggtgatcaccgccagttccggcatcaccaccgcggtatcttcaacaaagtgcgcatcaggataatccgccgccgcgggcagtacggtgaccttcaggccaagctgcagcagggtttctacataggagagaaactggcgggtggtggcggcgatatccggcgcgcccagccgggcggtagtttgtcctgcgccgcaggtggcggccgggagacgggcgatagcttgggtaaaatgcataaagaaccctctggtagtggtcgcattgcttaaggcaaaatcgtgagtgaatttgattatcaaacagatgccgccgccaatcaggctgaatcactttccggagccgcttattcacgctgtatatcagttcagattcgacgtattccgctgtgacccttaagaaacagcggatgacgggcaataactaaccgggttcatcgcccggctaagcaaaatcgttaagcgaatattacgcctaactattcaccgtaaccggctctgcgaaaagcattttttacagacatatctggacagtcttttcataattcctccatttttaagcagcgttcgctggctaaactagtatcattccgtgaaacgtttcaggatgagatagcaaattaatgaaaggtagcaataaaagccgttgggctgcggtgctggtggtcgcgatcgtcgcgggcgccgcgtactggttctggcagggtcgcgaagcggcaaacagcggcgcgccgacggcatcaggcgcgcgtcagcaggggcccggaggcggacgccccggtcgttttggcgccgccctcgcgccggtacaggcggccaccgccaccagcgaagcggtaccccgctacctttccggcctcggcaccgtgacggcggcgaataccgtcaccgtccgcagccgcgtcgacggccagctgctggccatccactttaccgaaggccagcaggtcaaagcgggcgatctgctcgcggaaatcgaccccagccagtttaaagttgccctcgcccaggccgaaggccagctggccaaagatcgggcgaccctcgccaacgcccgtcgcgatctggcgcgctaccagcagctggtcaaaaccaatctggtttcccggcaggagctggacacccagcagtcgctggtcagcgaaacccagggtacgatcaaagcggacgaagccgccgtcgccagcgcccagctgcagctggactggagccgcatcaccgcgccaatcgacggccgggtcggcttaaaacaggtggatatcggcaaccagatcgccagcggcgacaccaccgggattgtggtgctgacgcaaacccaccctatcgacgtggtctttacgctgccggaaaaccaaatcgccaccgtagtacaggcgcagaaggcgggaaaaaagctggctgtcgaagcctgggaccgcaccaataaacagaaaatcagcgaaggctcactgctgagcctcgataaccagattgacgccaccaccggcaccatcaagctgaaagcgcgctttactaacctggacgatgccctgttcccgaatcagttcgtcaacgcccgtatgctggtcgataccgagcagaacgcggtggtgatcccaaccgccgcgctgcaaatgggtaacgaaggccatttcgtctgggtactgaacgatgagaacaaggtcagcaagcacaccgtcacgccgggtattcaggacagcctgaaagtggtgatcaacgccgggctttccgccggcgatcgcgtcgtaaccgacggtatcgaccgtctgaccgaaggcgcgaaggttgaggtggtggaagcccacgatgcggctaccgccgccgagccggaaaaagccaccagccgcgagtacggtaaaaaaggagcgcgctcctgatgcaagtgttaccgccgagcagcacgggtggcccttcccgtctgtttatcatgcgcccggtcgccacgacgctgttaatggtggccattatgctggccgggattatcggctatcgtttcctgccggtttcggcgctgccggaagtggactacccgacgattcaggtggtaaccctctatcccggcgccagcccggacgtgatgacctcgtcggtgaccgccccgctggagcgccagtttggccagatgtccggcctcaagcagatgtcctcccagagctccggcggcgcgtcggtggtgacgctccagttccagctcacgctgccgctggacgtcgcggagcaggaagtgcaggcggccatcaacgccgccaccaacctgctgccttcggacctgcctaacccgccggtctacagtaaggtgaaccccgccgatccgccgattatgaccctcgcggtcacctcttccgccgtgccgatgacccaggtcgaggatatggtggagacccgcgtggcgcagaaaatctcccaggtttccggcgtcgggctggtcaccctcgcgggcggccagcgcccggcggtacgcgtcaagctcaacgcccaggccatcgccgccctcgggctgaccagcgaaacggtgcgcaccgcgataaccagcgccaacgtcaactcggcgaaggggagccttgacggcccgtcgcgggcggtgaccctctccgccaacgatcagatgcagtcggcggaagattaccgccggctgattatcgcttatcagaacggcgcgccgattcgcctcggcgacgtcgccaccgtggaacagggcgcggaaaacagctggcttggggcatgggccaacaatcagcgggcgatcgtcatgaacgtccagcgccagccgggggccaacattatctcgaccgccgacagcatccgccagatgctgccgcagctcaccgaaagcctgccgaaatcggttaaagtacaggtactttccgaccgaaccaccaatatccgcgcctcggttagcgatacccagttcgagctgatgctggccatcgccctggtggtgatgattatctacgtctttctgcgcaacgtcccggcgacgattattcccggcatcgccgtaccgctatcgctggtcggcacctttgcggtgatggtatttctcgatttttcaattaacaacctgacgctgatggccctgaccatcgccaccggctttgtggtcgatgacgccatcgtggtgattgaaaacatctcgcgctatatcgagaaaggcgaaaagccgctggccgccgccctgaaaggggccggagagattggctttaccattatctcgctgaccttctcgctgattgcggtgctgatcccgctgctgtttatgggcgatatcgtgggccgtctgttccgcgagttcgccattaccctggcggtggcgatcctgatttccgcggtggtgtcgctgaccctgacgccgatgatgtgcgcccgcatgctgagccacgagtctctgcgcaagcagaaccgcttctcgcgcgccagcgagcgtttctttgagcgggtgattgccgtctatggccgctggctgagccgggtgctgaatcatccgtggctgaccctgagcgtggccctcggtacgctggtgctgtcgattatgctgtgggtgtttattccgaagggcttcttcccgattcaggacaacggcattatccaggggacgctgcaggcgccgcagtcggcgtcgttcgccaacatggccgagcgccagcagcaggtgtcggcagcgatactcaacgatccggcggtggaaagcctgacctcctacgtcggcgtcgacggtaccaacccggcgctcaacagcgcccgcctgcaaatcaaccttaagccgctggacgagcgcgacgatcgcgtgcagacggtgatcgcccgcctgcagaacgcggtgagcggcatccccggcattgagctttacctccagccgacgcaggatctgaccattgacaccaccgtcagccgcacccagtatcagttcaccctgcaggccaactcgctggacgcgctcagcaactgggtcccgcagctgctggcccggctgcaggcgctgccgcagctctccgacgtcagcagcgactggcaggataagggcctggcggcgtatatcaacgttgaccgcgatagcgccagccgtctcggcatcagcatggcggacgtggataacgcgctgtataacgccttcggtcagcgcttaatctccaccatttatacccaggcgaatcagtaccgcgtggtgctggagcatgatacccaggccacgccggggctggcggcgctggataatattcgcctgaccagcagcgacggcgggattgtgccgctgaaatccatcgccagcgtcgaggagcgctttgccccgctatccataaaccatctcgatcagttcccggttaccaccatctcgtttaacgtgccggacaactattcgctgggcgatgcggtcgaagcgattcttggcgccgagcaggcgctggaattcccgagcgatatccgtacccagttccagggcagctctctggccttccagtcggcgctcggcagcaccgtctggctggtggttgccgcggtggtggcgatgtatatcgtcctcggggtgctgtatgaaagctttattcatccgataacgattctctccaccctgccgacggcgggcgtcggcgcgctgctggcgctatggctggcggggagcgaactggacgttatcgcgattatcggcatcattctgctgatcggcatcgtcaagaaaaacgccatcatgatgatcgacttcgcgctggccgccgaacgcgagcagggcatgccgccgcgcgaggcgatctaccaggcctgcctgctgcgcttccgcccgatcctgatgaccaccctcgccgccctgctgggcgcactgccgctgatgctcagtaccggcgtcggcgcggagctgcggcgtccgctggggattggcatggtcggcggtctgatgctcagccaggtgctgacgctgttcacgactccggttatctatctgctgttcgaccggctgtcgctgtatataaagagccggttcccgcggcgtgaggaggaggcgtaggtgaagtttttcgccctcttcatttaccgtccggtggcgacgattctgatttcgctcgccatcaccctgtgcggcatcctcggtttccgcctgctgccggtggcgccgctgccgcaggtggatttcccggtcatcatggtcagcgcctcgctgcccggcgcgtcgccggagaccatggcctcttcggtggcgacgccgctggagcgctctttggggcggattgccggggtcaatgagatgacctcctccagctcgctcggcagtacgcgcatcattcttgagttcaactttgaccgcgatatcaacggcgcggcccgcgacgtgcaggcggcgattaacgccgcgcaaagcctgctgccgagcggcatgccgagccgtccgacctaccgcaaagccaacccgtcagacgcgccgatcatgatcctcaccctcacctcggatacctggtcccagggtgaactgtacgacttcgcctctacccagctggcgcagaccattgcccagattgacggcgtcggcgacgtggacgtcggcggcagttcgctgcccgcggtgcgcgtcgacctcaacccgcaggcgctgtttaaccagggcgtatcgctggacgcggtgcgcaccgccatcagcaacgccaacgtacgtaaaccgcagggggcgctggaagatgccacccaccgctggcaggtggcgaccaacgacgagctgaagaccgccgccgaataccagccgctgatcgtgcactataacaacggcgcggcggtgcgcctcggcgacgtcgccaacgtcaccgattcggtgcaggacgtgcgcaacgccgggatgactaacgccaaaccggcgattttgctgatgatccgcaagctgccggaagccaatatcatcgagacggtggacagcattcgcgcccgcctgccggagctgcagcgcaccatcccggcctctgtcgatctgcaaatcgcccaggaccgctcgccgaccatccgcgcctcgctggaggaagtggagcaaacgctggtcatctcggtggcgctggtgatcctcgtggtcttcctcttcctccgctcggggcgcgcgacgctgatcccggcggtggcggttccggtttcgctgatcggcaccttcgccgccatgtacctgtgcggcttcagccttaacaacctgtcgctgatggcgctgactatcgctaccggcttcgtggtcgatgacgccatcgtggtgctggaaaatatttcccgccatctggaagccggcatgaagccgctgcaggcggcgctgcaggggagccgggaagtcggttttaccgtcctgtcgatgagcctgtcgctggtggcggtgttcctgccgctgctgctgatgggcggcctgccgggaaggctgctgcgcgaattcgccgttaccctgtcggtggcgattggcatttcgctggcggtctctctgaccctgacgccgatgatgtgcggctggctgctgaaaagcggcaagccccacgagccgacgcgcaagcgcggggttggccgcctgctggtggcgattcagggcggatacggcaaatcgctgaagtgggtgctgaagcacagccgcttaaccggactggtgctgcttggcaccatcgcgctgagcgtctggctctatatctcaattcccaaaaccttctttccggagcaggacaccggggtgctgatgggcggtatccaggcagaccagagcatctcgttccaggcgatgcgcggcaagctggaggactttatgaagatcattcgtgaagatccggcggtggacaacgtcaccggttttaccggcggctcgcgggtcaacagcggaatgatgtttatcaccctcaagtcgcgcgatgagcgccatgaaacggcgcagcagattatcgatcggctgcggaagaagctggccaaagagccgggggccaacctgttcctgatggcggtacaggatatccgcgtcggcggccgtcaggccaacgccagctaccagtatacgctgctgtcggacgaccttgcggcgctgcgggaatgggagccgaaaatccgcaaaacgctggcggcgctgccggagctggcggacgtcaactccgacagccagaataacggcgcggagatggatctgatctacgatcgcgataccatgtcgcggctcggcatcagcgtgcaggacgccaacaatctgctgaacaacgccttcggtcagcggcagatctcaaccatctaccagccgctgaaccagtataaagtggtgatgcaggtcgacccggtctacacccaggacgtcagcgccctcgataagatgtttgtaatcaacagcgaagacaagccgattccgctctcctatttcgccaaatggcagccggctaacgcgccgctgtcggtgaaccaccaggggctgtcggcggcgtcgaccatctcctttaacctgcctaccggcaagtcgctgtcggaagccagcgacgccatcaaccgggcgatgacccagattggcgtgccgtccagcgtccgcgggtccttcgccgggaccgcgcaggtgttccaggagaccatgaactcgcaggtgatcctgattctggcggccatcgccacggtctatatcgtgctggggatcctctatgagagctacgttcatccgctgaccattctgtcgaccattccgtccgccggcgtcggcgcgctgctggcgctggagcttttcgatgccccgttcagcctaatcgcgcttatcgggattatgctattaattggcatcgtgaagaaaaacgccatcatgatggtcgatttcgcccttgaggcgcagcgcaacggcaacctgccgccggaagaggcgatcttccaggcctgtctgctgcgcttccggccgataatgatgaccaccctggcggcgctgttcggcgcgctgccgctggttatctccggcggcgacggctccgagctgcgccagccgctggggattaccattgtcggcggcctggtgatgagtcagctgttgaccctgtacaccacgccggtggtctatctgttcttcgaccgtctgcggctgcgtttttcgcgaaaagtccctcaaccggtaagcgaataacatgacagatcttccctccagcgtgcgctggcagctgtggatagtggccttcggcttttttatgcaggcgctggataccactatcgttaacaccgccctcccctccatggcgcagagcctcggggagagcccgctgcatatgcatatggttatcgtctcctatgtgctgacggtggcggtgatgctgcccgccagcggctggctggcggatcgggtcggggtgcggaatatcttttttagcgccatcgtgctgtttaccgccggctccctgttctgcgcgcaggccgccacgctcgatcagctgatactcgcccgcgtgctgcagggcgtcggcggcgcgatgatggtgccggttggccgcctgacggtgatgaaaatcgtcccgcgcagtcaatacatggcggcgatgaccttcgtcaccctgcccggccaggtgggtccgctgctcggcccggcgctcggcgggatgctggtggagtacgcctcctggcactggatcttcctgatcaacattccggtcggcatcgtcggcgccatcgccacgctgtgcctgatgcccaactacaccctgcaaacccggcgctttgatatcttcggctttattctgctggccgccggcatggcgacgctgaccctggcgctcgacggtaaaaaagggctcgggctctcccccctgtggctgacggcgctggtggccatcggcgcggcgtcaatgctgtgctatctgtggcacgcgcgcggcaaccgcaacgcgctgtttagcctgaaactgtttaccaaccgcaccttttctctcggccttggcggcagcttcgccgggcgtatcggcagcggcatgctgccgtttatgacgccggtgtttttacagatcggcctcggctttacgccgttccacgccgggctgatgatgatcccgatggtgctcggcagcatggggatgaagcgcattgtggtccaggtggtcaaccgcttcggctatcgccgggtactggtgacctcgacgattggcctcgcgctggtcagcctgctgtttatggccgttgcgctcgcgggctggtactggctgctgccggtggtgctgttcctgcaggggatgattaactccagccgcttttcttcaatgaatacgctgaccctgaaagatctgcccgacgatctggccagcagcggcaacagcttgctgtcgatggtcatgcagctgtcgatgagtatcggcgtcactatcgccgggatgctgctcggtctctacggccagcagcatatcagcgccgatgcggcgatcgctcatcaggtctttctctatacctacttaagcatggcggtgattatcgcgctgccggcgctgcttttttcccgcgtaccggacgacaccacgaccaataccgtgattcgtcgccgtaaaaggagtgagtcttgaagttctggcgtcccggcattaccggcaagctgtttatcgcgatcctcgccacctgcatcgtgctgctgatcagtatgcactgggcggtgcgtatcagctttgaacgcggctttattgactatatcaagcgcggcaacgaacagcgcctgaccatgctcggcgatgccctgagcgagcagtatgcccagcacggcagctggacgttcctgcgcaacaacgaccgctttattttccagctgctgaaaacctttgaacgcgacaacgatgaccgctcgccgccgggccgcggtatgggccacggtccgatggatgagccgcacggtggccccggcccggaagagatgccgccggacgccgcgccggaccggccgctcgacggtccacgcggcgatcgtggcgaccgcggtcccggccccgatatgcctccgcacggctggcgcacgatgttctgggtggtcgatcaaaaaggacgcgtactggtgggcccgcgcgaacgcgtgccgaaggacggtacccggcgcagtattatggtcgacggcgttgaggttggcgcggtcatcgcctcgccggttgaacgcctgacgcgcaacaccgatatcaactttgaccgccagcagaaacgtaccagctggctgattgtcgccctcgccacgctgctggcggcgctggccaccttcccgctggcgcgcggcctgctcgcgccggttaaacgcctggttgaggggacgcaccgtctggcggccggcgatttctccacccgcgtcgccgccaccagcagcgatgagctggggcgtctggccaaagattttaaccagctggccagcactctggaacgcaaccagcagatgcgccgggacctgatggccgatatttcccacgagctgcgcacgccgctggcggtgctgcgcggcgagctggaggcgattcaggatgggatccgcaaatttaccccggactccatcgcctccctgcaggcggaagtcgccaccctcaccaaactggtcgatgacttacaccagctgtcgatgtccgatgaaggcgccctctcctaccagaaaacctcggtggatatcatcaatctgctggaggtcgccgccggcgcgtttcgcgagcgcttcgccagccgcgggctgtcgatcggcgtttcgctgccggaaagcgcaacgattttcggcgaccgggatcgcctgatgcagctgtttaataacctgctggaaaacagcctgcgctataccgatagcggcggcggcctgcagattagcgccagccagagcggggatgggctggttctcgagtttgccgatagcgcccccggcgtcaccgatgaacagctggagcggttggttgagcgtttttatcgtactgaggggtcgcgcaatcgtgccagcggcggctctggtttagggctggcgatttgccttaacattgtcgcggcccacggcggtactttgcgtgccggccattcgcctttgggcggggttagcattaaagtagaactacctctggaacgtaatttatcgagagacgtatgactgaattacctgttgatgaaaacacgccacgcattcttatcgtggaagatgagcccaagctgggtcagctgctgatcgattatcttcaggcggcgggctatgcgccgacgctgattaatcacggcgatcgggttctcccgtacgttcgccagacgccgccgcatctgatcctgctggatctgatgctgcccggcaccgacggcctgaccctgtgtcgggaaatccgccgtttctctgaggtaccggtggttatggtcaccgccaaaatcgaggagatcgaccgcctgctggggttagaaatcggcgccgatgactatatctgtaagccctacagcccgcgtgaggtggtggcccgcgtgaagaccattcttcgccgctgcaaaccgcagcgcgatctgcaggcgctggatgcggaaagcccgctgattgtcgacgaaggtcgttttcaggcttcctggcgcgacaagctgctggacctcacgcccgccgagttccgcctgctgaaaaccctctcccaggaaccgggtaaagtcttctcgcgcgaacagctgctgaatcacctgtacgatgattaccgcgtggtgaccgaccgaacgatcgatagccatatcaaaaacctgcggcgtaagctggagtcgctggacgccgagcagtcgtttatccgcgccgtttacggcgtagggtaccgctgggaagccgacgcctgccggctggcatagttagcccctgcccgacttttccccggttcgcgctgcgcttagccgggctacaggctcaccgccgtctgcgggccgggtagcccggacaggcgcgtcaagcgccgcctccggggaaaaagcagcggctgaaaccggcagatagcggccgcttgatgcatacccggaactgatttgccgtccgcttatcgccaaagatacccgactgatatttactcccctcccccacggcgctacaatgcccgcccttaatgtgggggcactccccaactcgccgtaccgggtgcggcgaatctgacctgtcatcagaacgagaaaatcatgtttaaaccggaactcctttccccggcgggaacgctgaaaaatatgcgttacgctttcgcttatggcgcagatgccgtttacgcaggccaaccgcgctactccctgcgcgtgcgtaataacgaattcaatcacgaaaatctgcagctcggcatcaacgaagcccacgcgctgggtaaaaaattctatgtggtggtcaacattgccccgcataacgccaagctgaaaacgtttattcgcgatctgaagccggtggtggaaatgggaccggacgcgctgatcatgtccgacccggggttgatcatgctggtgcgcgaaaatttcccgcatatggatattcacctgtcggtacaggccaacgccgtcaactgggcgacggtcaagttctggcagcaaatggggctcacccgcgctattctctcccgcgagctgtcgctggatgaaatcgccgaaattcgcagccaggtgccggaaatggagatcgaaattttcgttcacggcgcgctgtgcatggcctactccggccgctgcctgctctctggctatatcaacaaacgcgacccaaaccaggggacctgcaccaacgcctgccgctgggagtataacgtgcaggaaggtaaagaagacgacgtcggtaatatcgtgcataagcacgaaccgatcccggtgcagaacgtcgagccgacgctgggcatcggcgcgccgactgaccaggtgtttatgattgaagaggccaaacgtccgggcgaatacatgaccgctttcgaagacgaacacggcacctacatcatgaactcgaaggatctgcgcgcgattgcccacgttgagcgcctgacccagatgggcgtccactcgctgaaaatcgaaggccgcaccaaatcacattactattgcgcccgtaccgctcaggtctaccgcaaggccattgacgatgctgccgctggcaaaccgttcgatacctccctgctggataccctggaaaacctcgcgcaccgtggctataccgaaggcttcctgcgtcgccatacgcacgatgactaccagaactacgagcacggctactccgtttccgaacgccagcagtttgtcggcgaatttaccggcgagcgcaacggccagctggcagcggtggcggtgaaaaacaaattttccgtcggcgacagccttgagctgatgaccccgcagggcaacgttaactttaccctcgagcatatggaaaatggcaaaggtgaacgcatgccggtggcgccgggcgatggccacacagtatggttgcctgttccggaagatatggcgctgcagtatgcgctgctgatgcgtaattttactggtcagacgaccagaaatccgcacagtaactagttaatttgggttattttttcacgatgtaaagatattagaaacggatcacataccggttcgttcaaagcagatatcatccatttcgctgaaaaacataacccataaatgctagctgtaccaggaaccacctccttagcctgcgtaatctcccttacgcgggcttatttttttatctctctcccggccttccctttccgcatgcggtacactttatgcatcattgagcaacaaaggtcccctgataatgtccacgtttccagccagcttactgattctgaatggtaaaggcgccaatgaaccgtccctgcgagaggcggttaaactgttacgcgacgaaggtatcgatattcacgtccgcgtcacctgggaaaagggcgatgccgttcggtttatcgatgaagccctgacgctgaatgtcgaaacggtgattgccggcggcggcgatggcaccatcaatgaggtggcgacggcgctggtggagcgcgacggcaatctggcgctggggattttaccgctgggcacggcgaacgacttcgccaccagcgtcggcatcccccaggatctggccagcgccctgaagctggccatcgttggccgcgatgtggcgatagatgttgcacgggttaacgataagaccggttttattaatatggccaccggcggtttcggcacccgaatcacgaccgaaaccccggagaagctcaaggccgcgctgggcggcgtctcttatttaatccacggcctgatgcgcatggatacgcttaagccggaccgctgcgaaatccgcggcgagaactttcactggcatggcgacgcgctagtcatcggcatcggcaacgggcgccaggccggcggcggccagcagctgtgcccggaagcgttaatcaacgacggcctgctgcatctgcgcattttcaccggcgaagagctaatccccgcgctgttcagcaccctggccaatccggaaacctcgccgaatattatcgacggcgtctcatcgtggttcgagatcaccgcaccccacgagatgacgtttaatctcgatggtgaaccgctaaccggcaaaaccttccgtatggagctgttaccggccgcgcttcgctgccgactgccgccggactgcccgctgctacgttaatcaggtttcgcaaagcaaagacggcgcccggctggtatacagcagccgggtacgttcgttgagccgctggatgttaaggtaaaacggtacctgcggctggaggaaaaacgctggcaggatacgctttacatgctcctcctgctcggtctcgccgatgctggctgagacggtttccgaacgcaggaagtagtgctggccgtcgcgggtaaagctaaaccagatgttctgattaatggtaaacgcagcgccctgcggcggcgtaatttccccccggaccatcgccagcccgcgactgctatcaaatacgtagcgtaaggaaatatcgccctggtagcctgcgttaattagccgcatctcgccgctgcactggaaatgattgcgctgccagtattgccaggatttgatcattattccgctaagcaccccgataaatacgatagcgattaaccatttaatttcacgcgggcgcattggctacctccttaatgtaatatttggtgaggcattgattatcacgccattgactaaatggctgacggcagcgaatcaccgacacccgcgcttgcccgggataaagcgtcaaataaatccacgagtattcttcacattcaaatttgctgcgcttgataaaattgacatgacgaacgtgatcaaccacatcattattggcaaaaaaatgacattgttgcgaaaatttagcaattatgggcgaataagtttgcaaataagagtcgaattctgtttgccacgcaacaaaaccgccgaccagacagctcagcagcgccgcaagcccccataacagagagcatcgcggccttaaccgctttttttcaggcacactcgcagccgcgacctcctcgtgcacgggcccatccaggggcacctgtggctccggtgccttctccatctcgcacggctgggactccgtcaccgatattgtcgcatccagcctgacgccaaccctcggcagcgtaataataatatcgccctccatgcccagctctttaaatgcccggcgcagcagagaaatattctggtagaaaccgttgctggttacctgggagccatgctttatccacacttcctcgaaaaaggtttcgcgggcaacggttttgccatcctgctgaataagcagcaataaacaacggctggccggcatatttaatgaaaccgttttcgtctcgtcagcaatgagtattagagcaccacgttgaggaataaatgtaattattccattaatcgtatatgttttttccatcctgttccctgagaatagtaatcaagtggataagcggcatgggtaccctactctaaatacggtaatcctttatgacgcagctgataacttaagattattcgcaggcgagtttactctattactcagcggatctggaggcgtaatacgcagtttttccttgcaattaacaaggtttaaatgaatttacagcatggaatattttgagatttgaagaaaatctggttatttatttcaaaatgaataataaacacaagttatgattccatatattttcattcatacaacagatactttcattttagatctaaacaccacttttacattaatagacgatatttataactattaatacatatcatttcaaagttttatccaaaaacagggcgcattgtccgcgagacaatgcgccatatcgcttagtatgccgccacctcgcgcgccatttcgcgcgtatattgccggctggcgttaaccagcatctgcgtataggccgtttgcgcctcgccgttgaccagcgcatcgaccgtcagggtttcaaggattttcccgtactgcattaccgccaccttctggcataaatgggcaatgacgcccaaatcgtgggtcaccatcaggtaagtgagtttagcctcctgctgcaattctgccagcaggttgaggatctcggcctgcaccgacacatccagcgccgacgtcggctcatccagcagcagcacctgcggctcaaggatcagcgctctggcaatcgccacgcgctgccgctggccaccggaaagctgatgcggatagcgttcgcgaaacgcacgattgaggcccactttgtccagcagcgcatgaatccgccggtcgcgatcgtgaatgcgatgaatctgcagcggctcttcaaggatatcgccaatagtgtgacggggatgcagcgatccgtacgggtcctgaaataccatctgcacctgacggcagcgctcgcggctaatctcatgccctaagcgctgcccgtcaatagttaactccccctgccagtgggtaaacagccccgccaggcacttcagcaccgtggttttgccggagccggactcccccaccagaccgtagatctcgccgggcttaacgtggaaattaacgtcgtacagcacctggttacgcttctccccttcgccaaacgcgaggttgagacgttgaacttcaatcatcatccactccttattccgttaaccagctggcctggcgctgcagcaccggcagtatcgggcgacgatgctgcatatccggcagcgagttaatcagcccctgagtatagggatgacgggcgttatcgaggtcgcaggcggcaatagactccaccacccgtccggcgtacatcaccagcacgcggtcgcaaaagctgcgcaccaggttgatgtcgtggctaataaaaatcagccccagcccgcgcgactgaaccagatcatccagcaggcccagcacctgcaggcgcaccgacacgtccagcgcggaggtcggctcatcggcaatgatcaattccgggtcggtaatcagcatcatggcgatcatgatgcgctgcccctgtccgccggatatttcatgtggataaagctgataaacgcgctccggctggcgaatacgcaccacctccagcatctccagcgcctttgccttcgcctcatctttgcgtcccggatgatgggtcagccaggcctcggcgatttgcttaccgacgcagaccaccggattaagcgaatatttcgggtcctgcataatcatggagatacgtttgccgcgcacgccacgcatctgcgcttcagtaagatgcagcagatcgaggttggcaaactgcatccggctggcgctgacgcgggcctttttcggatgcagctgcagcagggcgcgcccaacggtggatttacctgaaccggactcgccgacaatggccagcttttcgcgccccagctggaaggagacgccgcgcacggcatgggtcaccgcgctgccgttaacaaagtcgacgcacagatcgcgcacgtcgagcagcggagcattattcgctgcggggatcgaggatgtcacgtaggccatctcctaagaagttaaacgctaagctgttgatcagaatcgccagccccggaatcgtaaccacccaccagcactccatcatgtaagtgcgcccgctggagatcatcgccccccactccggctccggcggctgcgcgccgagcccgagaaagcccagaccggccgcggtcagaatgatcccggccatattcatggtgatacggataatgaccgagggcagacacagcggcacgatatggcgccagaggacgcgggccgatgatgcgccctgcagacgtacggcggagataaaatcggcctggcgcagagagagcgtttcggcgcgcgccaggcgggctatcggcggccaggcggtgagcgtgatggcgataaccacgtgctccagccccggacctaaggcggcgacaaacgccagcgccaggaccagactcgggaaggagatgaaaatatcggtgacgcgcatcagcaccatatcgaccttaccgccaaaatagccggcgcaaacgccgagcagcagcccgagcggaccgacggtcaccgagaccagcagcacgatatagagcgtgatgcgcgagccgtacaccaggcggctaaatatatcccggccaaactcatcggtgccgaaccagtgctgcgcgttcggcgcgaccagcgcgctgttcaggtcctgcaccagcgggttatacggcgcaatcagcggcgcgaaaatcgccaccaccagcagcagaaagataattccgccgccgatggccgttagcgggttgcgcgccattttgccgataaacccgacggcccgcgccgccgcgcgttgcagccgctgacggccttcgcccgtgccgcccgaaagcggcgaatccagagaaacggtcatgattttgtcctcgggtcaaagaattgatacagcatgtcggagagcaggttgagcatcacgaagatcgcccccaccagcagcacgcagcccattaccgcattcatatcgcccagcagcaggctaccggtgaggtaggagccgaaacccggccacgagaagacggtttcaatcagcaccgcgccttccagcagcgcgccgtaggccagcgccaccaccgtcagcagctgtacgaggatattgcgaaacgcatggttccagatgacctgacgctcggtcagccccttcacccgcgcggtaataatgaactcctgcgacagctgggccagcataaagctgcgggtcatgcggctgatgtaggccagcgagtgaaagccgagcagcgaggcgggcagaatcaggtgattaatggcgttccagaagacctggccgttgcccgccagcagcgcatcaacggtcatcaggccggtgcggcgcggcaccacaccatccagcccgagatctaccctcccggcgccacccacccagccgagccaggcatagaacaccagcagtcccatcatcccgacccagaagatcggcgtcgagtagcccgccaggctgataatgcgcacgacataatcggcgacgctattgcgccgcgccgccgccagcacgcccagcggaataccgaggcccgcgccgacgagaatcgccatcgtcgccagctccatggtggccgggaagacgcggataatgtcgtccaccaccggtttcccggtcagcagcgcgttgcccagatcgccgtgcagcaggttgacgaaatagatgccaaactgggtggtcagcgatttatcaaaccccagctgatggtaaacctgctggtaggtactctggtcagcatccgggccgacaatcgccagcaccgggtcgatgggcatgacgcggccaatggtaaaggtcagcagcagcaggccgaacagcgtaatcaccacctgcagcagccgttttgataagcgccggccgcgtgagccgggcgcaaggattgcgatactcatcctttttctccttcgcggactttatcgacgtcacgcagaaaagtggtggcagaggggtgcggctgatactgccgcacctcgttacgcaccaccacggaatcgaccatctgcgaaagcggaataagggccgggaccagctggtcgtagcgcgtctggatggcctggtagtcggccacctgtttttgcggatcgcgttccagcagggcgcggtcaatcatcgcgttgagctgcgggtcgtaaaagccggtgcgccagccctggaagttggtcaggcgcgcctcatcgctgttatccgggttatagaccagcgcgcgcaggctggagtgcgggtgcggctccattccgctgccgccgcgtcctaccagcaggtcaaatttacgctcgcgcatcgcgccgtagatctggttaccggtgccggtgataattttggcgttaatccccgcctgcatcagcgtcgactgcacggcgattgcaatgttcaggaacggctgatccgagaggacccgcaacgtggtatcaaagccgttgggatagcctgcttccgccagcagctttttcgcccgcgccacgtccagcttatagcccgggtcgggcagcgttgacggcatgcccgccttaatcggccgctggtgcagcaccccgtagcccggcatcagcgctttattgatgccctggtagtcaatcagatagcgcaccgcttcacgcactttcggatgggcgaagtgcgcctctttcatgctcatcgccacgtagtacatggtgccgcgctgcaccgcgtcgacggtcagctgggggtcgctgcgcagggcgttgatgtcggaaaccgccatattgttggcaatatcgaggtcgcctttttcgatcatcaggcgcagggtttgcgactcctggaaatggcgcagcaccacgcggctcattttcgcctcgccgcgccagtagtcaggattgcgcttcatgcgcagcacatctttcgcctgccaggtttccagcgtgaacggcccggagccggcttcatgggtggtcagccagcggttaccccagtcgttatcctgctggtggctttgcaccgttttgctgtcgagcactccgaggttgcccagcgccgccagcgagtagatcaccagctgcgggtcgttatctttgggcaacacgatctgcaccgtgaagctgtccggcgcgctgacctggccgtcgatgtttttctgactgaagccgtaggatttccataccgaggcctgcgccaggttgaggtgcaggatgcgccgcatcgaccacaccacgtcggcggcggtcagcggattgccggagtgaaatttcacgtcgtcgcgcagatgaaaggtcagggttttgccgtcggggctgatatcccaggatttcgccagcgcgggcttaacgttggtgagctgctcagggtcaagctccaccagcgagtcgtagaggttgaccacgatccccaccacttcattaccggtcatcgccgccgggtccagggtgagcaggttattcatattcataccgatgatgagctggtcgggcggcgttttcgccatcgccgccccgctccccatcgacacggcgagcgcgagcaagcacgctgccagtcgggaggtttttttcatatctctgtttgcctgtactgtagggtacatgttgccggatgacggcattttcgccttatccggtctaccgggccgcagacccgataagcgcagcgccatcgggcatttatttttttgaatcagtcgtggctaacggtattggcttcgatatacgcaaaattaatgtcttcgccgaggcccggacgttgtgacagatgcacaaagccctggtcatccatggggtcgacaaggctgttgagataagccgccggttcatcgtagtcgaggaacggatgcagcaggccgcgctcgtaccagcggcagttgcggatcgccccgaccaccgccaggcttgccgcgccgttgccgtggacttcgcaatccatgccgaaagattccgccagcgccgcgaccttcatggtcggggtaataccgcccacgccgttagcgccggcgcgcagaatgtcgcaggctccggctttcacccattcggcgcgcatgcggtgcttgccgccgaagctctccggcccgacgatggggatcgacaggttttccgccagccacgcgtaggaggacatcgaatcctcctccatcggctcctcaaaccaggcgaagttgagtttttccagctctttgccgatccacagcgcctcggcgcggctgtaccagtgatagccgtcaatcatcaggtcaatatccggccccaccgcttcgcgcaccgccgcgcaggctttaatgtccattttgggattgggcgcaaaagagattggcggcatccaggtgtgcagcttgatggccttgtagccgcgggcgaccagcttttcggcaaaggcggcatactcctccggggtcgacagaccgcccggcagatcgtcgccgcacatcgtgctgccgtaggccgggacgatgtcgcgatagccgccgagcagcttgtaaaccggcatcttaaggctgcggcctatcaggtcccacagcgcctgttcaataaacgacagcgcgcgctcggtcagctggtgagcgctgccgcgctgccagtggttaagatcctgccagatacgctcgcggttaaacgggtcctgccccaccagcaccttgcggaaaaaggtattcaccacgaacgggcgcaccacttccggaggcgcaaacgaaaagccctgcgcgccatcatcggcggtgatggtcagcatcgccattttggccatgctttcagcccccggatgggagtgcccggcgctgtcggaaacccgacgcgtgggatactggaaaacggtgacatttacagattcaattttcatgctcggtccttatcacggccaaatccgatcgatagaagcaaatcggcaaagtggtttcacattattgaaaatacgtttcaatatctaatctaagcacaattacgcagcagtgcctcggacaaacaccgctaagcaaggcaataaatttgggcattggcacaacaaggcgtgactgttttcacaaaagataagcgaaatgtgaggcggatcggcatggtgaaaaaggggggcgtgagcgcagaaaagagagtaaccgaccgtgtacatcccgggattttctgcgctcacgaaagggtgagttattcgaccgcctccgcctcggcggtgagggcttccagcagttcaggcagcgcccgatagcggccagcggcgccctgaaaacgcgcgtgctggctatcttcggcaatcactatcgtggcaatccccgccgcccgggcggcgctaaagccgttgaagctgtcttcgatcaccaggcaccggctggcgtcgagattcagcttatccaacgtcgtcagatacaccgccggatgcggcttgccctgcgcttcatcgtccgcgctgcaaatcacatcaaaatagtgccagagcgagagcttgttcagcacggcggcgataacctgccgggacgaggaggtggcgagggcaattttataaccggcatggcgaaaatagcgtaacgcctcatgcacgccgcgcatcggctcgccttcggcggcgatcaggccggtaatacgctgcaatatcgcggcctcaagccgctgcggggcaagctcaagctggcaatagcggcaccaggtgcgggcaatatcgtcgaggcgtttgcctttggtcagggtttcgcactcctcgacgctcgccgttgccccccactgcgcgagggcgtcgatttgcgcctgccgccacagggcttcggaatcaataattacgccatccatgtcaaaaatcactgcctgaatactcatcatccacctcattaaggccggcatgcctggcatgccggccgcatcaccttaagagaactccacctgctcgctggccggcgcttccttgtgggaaaaacccggctgctcgacgcgaataaatgcacagaggaaaaaagccgccacgtacagcgcggtataggcgatcaccaccccgatggtgctgaagaacggtagcaaaatcaccgcaatggccggcgcgagaaagttcgacatccccgccgacaggttatataccgaaatggccgcgcctttgtgcttcggctccagcgccgggaaaaccgccgccagcggtacgaacgcggcgacaaagatccccagagcgatagccggaagcagcgccatcgcgaagttatgtccgaagtgctgcggaatgtaataaaacgccaggctggagagcgccatgccgatgcagccgaaccagcgcaccaccttcatccagcccagtttttcgcccagaatgccccacagcacgttcgaaaatatggtggtgaagaagaagaccgcccacacctgcagccattccgaggtggtaaagcccagctcatcgacgaacatcatcggcataatcaccgcaaagccgaacagcgacagggtgttgataattcgcaccatgctcgacagcagaatattgcggttggtatagagcagcgtcgccgcgcggcccagttcggcaaacttctcgcgggtggtcaggttctgcatatggtgcggcgttttaatatggcgcagggaagccagcgcaatgatgccgccggtgacgcagaaagccagcgccagccacaatgtccccagctcgccgatatgcgggatggtaaagctcggaatatagctgccgaacacgccgatgccgatcgagtaaaccgcccagaaccagccgatcgccgagctggcgttatcgcttttcacgttgtggacaatggcgacgataaacgagtaaaggaacagcggatacgcgaagccgcggatgccgtagaaaaccaggatcagggcatagttcgcgtgaccgaggccgaaaacgaggaacagcacgtggaacacgcaccacagcacgaagccaatcatcatggtcttcagcggcgtgatgatttccgccaccacgccggagatccacgccgacagcgcggcggccaggccgtagagggtaaaggcgaacgatgcctgcgccggggagaacccgagctctttgatgtagtgcgacaggaatgccagttcaaaaccgtcgccggtcataaatacggcaatggcgatgtatccccagagcaggttcaggggtaaaccgagccactgtttattattgatggacataatgacctcgtttttagggtacaggaggccgctccggtcagttcaccggagcggttatggtgataaaaattaatgctgccgatagttcagatcgtttaaatacagggccttaaactgcgcatagcgccgcatcagggtttgatggcgtaccgggtccgcgcgccaggtctgccagatctccggtttttcacagacttcggtaatcggtttgcccgccgccaggcaggccagccgcgccgcgcccagcgcgccgccggtctcaccgcctttgtgggtcaccaccggcatatcgaggatatcggccaacagctgcgcccagaacgggctgcgggcgccgccgccaaccagcgaacattgttcgatctgcgtaccgctctctttcagtacctgcagaccgtcgctgatgccgaagctcaccccttccagcaccgcgtagccgagctgggcgcgcaggctggagtgggtcataccccagaacatgccgcgcgcgtcaggatcgttgtgcggcgtacgttcgccggagagatagggtaagaagaacggcgcgtgggacttctcctcttcgctaagttcggcaatctcctccagcagcgccacttccgtagtgccggtcaggcggcagaaccactgcaaacagctggcggcgctgagcatcacgctcatctgatgccacagattcggcagcacgtgacaaaacgcatggaccgccgactgcggagccggacgataggcgtcggtcaccacaaacagcaccccggaggtgccaagcgaaatgaacgcatccccgggcgaaaccgcgccgacgcctatggcgctgaccgcgttatcgccgccgcctccggctaccgctaccgaggcgttcagcccccagcgttcggccacctgcgggtcaagggtggcggaaacctcacagccttcgaccagggtcggcatctggctgcgcgccaggccgcatttatccagcagagcgtcggaccagtcgcgcttcgccacgtccagccacagcgtcccggcggcgtcggacatatcggagacttttttaccggtcatccggtagcgcagataatccttcggcagcagcaccgtggcggtgcgctgaaagttttccggctcatggcgacgcacccacagcagcttcggcgcggtaaagccgggcatcgccaggtttcccgccacctgatgcagctccggcgccctcttctccagctccgcgcactccgcggcgcagcgggtgtcgttccacaggattgccgggcggatcgcctccccctcggcatccagcagaaccgcgccgtgcatctgcccggaaaggccaatggccttaatggccggccagtgctgggcgcatttttcccgcagcgtggtcatcagatactccgtcgcctcccaccatgactgcggcgactgttctgaccagtgcggatggggccgctgaatgctcagcggcgcgctatggctggcgataacctcattgttctcatcaatgaccagcgctttgacttccgatgtgccgagatcgatacccagatacatagtcacctcttagttaatcagcgtataaacggccgccactttttcgcgcatcagcgcgaggaaatcggcgttttcggccagttcgccaaacagcgctttatcgcgggcgtacagggccagcggatcgttggcttcaaacatctgatgtaccccctcggcgtcgaggatgccgtcctggtactcatacggcagagtgcccttgtgccactgctccataaagacgaagaacagcgcgggcagcatagcggtggcttgcgggcgaacgccgcgctggtagcactcctgcagggttggggcgatcatcgccggaattttcgagaagccatcggcggcgacgcgctggttggtgtcctggatatatgggttggtaaagcgtttgagcaccacgtcgcgataggccggcaggtcaatgccgttattgccgaggcatgggatcacatcttccgtaacgtagcggtcggcaatggcgtagatgaaatccgttagcgtgctttcatgaatgtactgctggccaattaacgttcccgcccacgcaatgcagctgtgcgacgagttcagaatgcgaattttcgcctcttcgtaaggaatcaccgacgccaccatctcaaccccgaccgcttccaggttcgggcgttcatcgcggaaattgttttccaccacccactggataaaggtctcgcccatcaccggcgctttatcgtcaatgccggtctgcgctttgatgcgcgcgggcaggtccgccgccgggcgcggggtgatgcggtcgaccatggtgttcggacaggtggtgttggcggccatccagtcaatcaccgcctgcttgccggttagctgcaggaactcaaccataccgtcgtggaagcgttcgccgttatggcgcacgttatcgcagttcagcagagtcagcggcccggcgttgtccgccatacgcttttccagaatccgcgcgatagtgccgtaaatcgttttgcactcccctgccagatcggcctgtaaatcgggattgctggtttccagcttatggcgggtattcaggtagtagccaccttccgtcacggtgaaggcgatgactttggtctgcgggtttgccccttcgttaatcagcggctgcagcccggcctgccacggcagcagtttctgaatggaggtgatctcttcatattcacgttcaccttccgggctgacggtttccagcacatagcgcccgccctgcgccgccagcgcctgaaccacctgttcggcgtcgttgcggatattccccgccgcgatgtgccagcgtttatctccggaagcgatcagacgatgcagataccacgcctgatgcgcgcgatgaaaagaacccagaccaatgtgaagccatgtgaattgattgttcatgttccgctctccttgagttgatggcctcactgtaaatgatcaattgaccaaaataagagccacggatcacaaaagaacaattacccaataaaattacaaatgaccagaaaagagcaaaagcttgccagttttcccgaccacggcgagaatgcgggtattcgccgggcgaaattatcgccgcggcccgacacttagggcaggaaagcatgagcaaagaagatgatatccggctggatcaaaaggtccgcgccgcgtggatgtactacatcgccgggcagaatcagagcgagatcgccagccagcttggcacgtcgcggccggtggtacagcggctgatcgccgccgcgaaagaagaagggattgtgtcgattagcctgcaccacccggtggcgaactgcctcgactatgcgcagctgctgcaggagaagtaccggcttatcgagtgcaatatcgtgcccgcctttaacgaagaaagcaccctggatagcgtctccttcggctgctatcagctgatggcccgctatctgcaggatgataaagagaaaatcatcggcctgggttccggcctgaccctgaaaaaagcgctgcagcgcatcgacttcgacagtctgaacacccgctgcgtcgccctgatcagcgccatggacgccgacggacagtgcaactattacgatgacgtcccgctgctgctgaccagcaaaattaaggccaagtactatcagtggcccgcgccgcgctacgcgcagacccaggaggagtacgacatgtggtgtaccagccggctgtttcgcagcgtttccgccgtcgcccgccgggcggacgttatttttgtcggcattgggccattaggtacccaaagccccatcttcaaagatggctttatcaatcaggcgcagatggatgagctgaccgcacgcggcggcatcggcgagatcatgggacgctttatcgatgccgaaggcggcgtggtggagagcgaaatcaacagaatgatcaccagctacgatatccgccagaaccagtgcccgcgcatcgcggtggcgtgcggcgagtacaaacgtccggcgattctggcggcgcttaaaggcggctggatcaacggcctggtgaccgacgagcacaccgcccgctggctgctgacgcgctaacggcggcagccggatcagcggctgctcatcaacagcggcgggatttcaatccgctgctgcccggcctcgccggcgtcaataatcgtgaacaccgcttccagcatcgccggcacgtcctgctgcaccatgtcgatatcgtgccccagcagatagacgaacgggtcccagtcaaagcagcccatcggcggctgggcgctgccggtaagtcccgcctgcgacagccaacgcaccaccccttccagcgatattgtcgagttgacaaatagccccggcaatggggtcttcgcggtagcaaaccgctcctgcaggcaggcctcaactttgccttttgaatagccgggcgccaggatattttcctgcggcacgaccagcccctgctcccgatgcgcatcgtggaagccgcgtaaacgctcgcgggtgttatggtcgctgctgcgcccaccgataaaggtcagcggcgccagcgctccccgacggcgagcgctgttggcgaggattttgtgggtcagcgccttcgcgccgccgtagttatccgatatcaccgacggggcgacagagcccggcaggtcgagattgaccgtgggcacgcctgcctgctggcacagggcggtaattttgtccggattggttgccccggtggccaccacccagtcaacctgccaggagagcatcgcttttaccgcttcgatctccagctctggcctccggcgcgtacaggtgataatcggcagcaggccgcgctcgcgggccatctcctcaaagcgctccgccaccgaaccgaaatagcggttatcgtatttggggataatcataccgatgacgcgcgattttttgctgcgcagcatgctggcctggcggttaatcgcatagccctgctcctcggcaatccgcgtcaccttttcggcaagcttcgcgctgatgcggcgctttttccagttgccgttgaggatagcgctcaccgcgctcgccgaaacgccggacagttccgccaggtcgtaaatcgtgattttcttcattttcccaacttgcgtcacaaaatcatttcgctgttaatttccccacttgctcaatcgatgaagctagcgcaacatgagcttcatcgattgagcttccattttacttcccgaagtattaacgcattcagcgtgaatacgccagcggacatcaaaaaaatgacgctcatattcaataccttaacaagttttcgtctccagcgtcgaacgcgatgccctcgcgttcgatagttccaaccagactctgtaaaggattataaaatgaaccactctgtctcctctatgaatacttcccttagcggtaaagtcgccgccattaccggcgcggcgtccggtatcggcctcgaatgcgccaggaccctgctgggcgctggcgcaaaagtggtgcttatcgaccgtgaaggcgagaagctcaacaaacttgtcgccgaactcggcgaaaacgccttcgccctgcaggttgacctgatgcaggcggatcaggtcgataatattctgcagggtattttgcagctcaccgggcgtctcgatattttccacgccaacgccggagcgtacatcggcgggccggtggccgagggcgatccggacgtctgggaccgcgtactacacctcaataccaacgccgccttccgctgcgtgcgtagcgtcctgccgcatcttatcgcgcaaaagtccggggacattatcttcaccagctctatcgcgggggtggtgccggtgatctgggagcctatctataccgcgtcgaaatttgccgtccaggcgtttgttcatactacccgccgccaggtttcgcagtacggcgtgcgcgtcggcgccgtgctgccgggcccggtggtcaccgccctgctggacgactggccgaaagccaaaatggacgaagctctggccaacggcagcctgatgcagccgattgaggtggccgagtcggtgctgtttatggtgacgcgctcgaaaaacgtcaccgtgcgcgacattgtgatcctgccgaacagcgtggatctctgaccgttcaaccagactgtgtgagaggatgttatgcaaagcgatacgcaacatattattggcgtcgatgtcggttcgggcagcgttcgcgccggggtgttcaatctgcggggcgagcttctcgcccacgcgacccgggaaattaccctgttccgcagcgccggaagcgtggtcgaacagtcgagccgcgagatctggcaggcggtgtgctactgcattaaaacggcggtggccagcgccggggtcgcgccgtcatcgattgccgggatcggcttcgatgccacctgctcgctggtggtgattggcgataacgacgccccgctggcggttgggccttcggaagatgcggagcgcaacattatcgtctggatggatcaccgcgccaccgggcaggcggaaaagatcaacgccacgggccacgcggtgctgcagtacgtcggcggtaaaatctcgccggagatggaaacgccgaaaattctctggctgaaggagaaccgcccgcacatttatcagcaggcgcgccacttcttcgacctcgccgattatctcacctggcgctcgaccggcgatttagcccgctcggtctgtaccgtgacctgtaaatggacctacctggcgcatgaacaacgctgggatgccagctacttccgccagattggcctcgaagagctggcggatgaagattttgtccgcatcggccagcggattgtcgatccgggaaccccctgcggcgacggcctttgcgccacggcggcagaggagatgggcctgccggtcggtactccggtggcggtcgggatgatcgatgcccacgcgggcggtatcggcaccgtcggcgtgcttaacggcgcggtcaacaatatggcctacgtcttcggcacctcctcctgcaccatgaccaccacgcaggaagcggtgttcgtgcccggcgtctgggggccatattactcggcgatggtgccggggttctggctgagcgaaggcgggcagagcgcggccggagcggccatcgaccagctgttgagcttccatcccgccgccgccgaggctaaggcgctggccagagcgcgcggcgtcccgctgccggtttatcttgccgatagcgtgctggcgaaagtggagcgtccttctgccgcggtcaaactcgccgccgggctgcacgtggtgcctgaatttttaggtaatcgggcgccgctggccgacccgcacgcgaaagcgattatcgccgggttggggatggagcgggatctggacaacctgatggcgctctacgtcgccggattgtgcggcatcggctacggcctgcggcagattattgacgcccagaaggcgtgcggcatccacagcgagcatatcgtcatcagcggcggagccgggcagcatccgctggtgcgccagctgctggcggacgcctgcggagtgagcgtggtgagtaccgaatccagcgaaccggtgctgttaggttcggcgattctcggcgcggtggccggccagatcgccccgtccctgccggaagcgatgaagcagtttacccgggtggataaaacctaccgctgcgttgcccagtatagcgccgatcatcagcggcgctatgaagcgtataaaacgctacagcacacggcgcggctgattcgcgagtaagcaagatcccgggctgcggcgtaaacgccctacccgggctaccagaccgcacgaaaccgtagcccggccaggcgtagcgccgccacacgaatgcttaagcgatggtgactttgccgtccagatagacatcctgcacggcattgatcagcttcacgccgtcggccatcgattttttaaacgccttacggcccagaatcagccccatgccgcccgcgcgcttattgataaccgcggtgcgcacggcatcggagagatcggtttccccgcccgcggcgccgccggagttaatcagcccggcgcggcccatatagcaattcgccagctggtaacgcaccagatcgatcggattatcgctggtgagcttgctgtaaacccggtcatcggtatagccgaagttcaccgctttatagccgccgttattttccgccattttctgcttcacgatatccgcgccgatggtcgccgccagatggttagcctggccggttaagtcagcggaaacgtggtagtcgacgccatcttttttaaacgccgaattacgcagataggcccacagcacggtcaccaggcccagttcgtgcgcgcgctcaaacgcagcggagatttcttcgatttgacgacgagactgttcggaaccgaaatagatcgtcgccccgaccgccacggcccccatattgaacgcctgctcaacgctggcgtacagcgtctgatcgtattcggtcgggtagctcagcgtttcgttatggttcagcttgaccaggaaggggatgcggtgcgcatagcggcgcgacaccgaggccagcacgccataggtggaggccacgcagttacaaccggcttcaatggccagttcgacgatatttttcggatcaaagtacagcgggttggcggcaaaagaggcgccagcagaatgctctacgccctggtcgaccggcaggatcgacagatagccggttcccgccaggcggccggtgttatacagggtttgcatattacgcagcaccgccggcggacggttgttatcaaccatcacccgatcgacgtaatccgaccccggcaaatagagctggtcggctggaatcgtcatacagcggtgctgtaaaagcgtgtcggcatctttgccaagcaactgcgtaatatcagtcatagcgatctcccgtaagtgccggtcgaaaccggcatgcattttcccaacccaattattttgggcagcaataagtctggtatcgaaagtgggatttttccattgcagagggatttttaaatgtcatccgctgacatcatccataaccgggaaaatgttatatcggtcaaagttccaccccaaaggtatttaaaaggtattacataatggtattgttattacgtaccttacctatcatgaaggatttaaagatgaaaactacagtaaagctgtcattcatgatgttcattgagtggtttatctggggcgcgtggtttgtccctttatggttatggctgaataaaagcggatttaccgctggtgaaattggctggtcctatgcctgtaccgccattgcggcgatcctttcgccgatcctcgtaggttcattgaccgatcgctttttctcagcgcagaaagtgctggccgtactgatgtttgtcggcgcggtattaatgtatttcgccgcgcagcaaaccaccttcagcggcttcttcccgttgttgctggcctactccctcacgtatatgccgaccattgcactgaccaacagcatcgcttttgccaacgtgccggatgtcgaacgtgactttccccgcattcgcgtgatgggcaccattggctggattgtctctggcctggtctgcggctttctgccacaaatgatgggctatagcgatatttctccgaccaatatccctttgttgatcgctgctggcagctcggtgctgctgggtatttttgcctttatgctgcccgatacgccgccgaagagtaccggcaagctggatttaaaagtgatgctggggttggacgcgctcatcctgttacgtgataaaaactttcttgtgtttttcttctgctcattcctgttcgctatgccgctggctttctactacatcttcgccaacggctacctcacggaagtcggaatgcaaaacgcgacaggatggatgacgctcggccagttctctgaaattttcttcatgctggcactaccgttcttcaccacacgctttggcattaaaaaggtattattgcttggtcttatcaccgcggcgattcgttacggatttttcgtctacggcggtgcagatcaatacttcacctatgccctgctgtttcttggaattttgcttcacggcgtaagctacgatttctattacgttactgcctatatctacgttgataaaaaagcaccggtacacatgcgtacggcggcgcaagggctaatcacgctctgctgccaggggtttggcagtttactcggctatcgtctgggcggcgtaatgatggagaaaatgtttgcttatcaagagccggtaaatgggttgaccttcaactgggcaggaatgtggggcttcggcgccgctatgatcgccgttatcgccgtgttgtttatgattttctttcgcgaatcggatacagagatcaccgctattaaggtgcaaaacgacgattgcgatgctgcactgaaacaagaggaagttaaatgaaaacggaacgtattctcggcgcgctctacgggcaggcattaggcgatgcgatgggcatgccgtctgaactctggcctcgctcacgcgttaaagctcactttgggtggattgaccgtttcctgccggggccggctgaaaacaatgcagcctgttactttaatcgtgccgaatttacggatgatacatcgatggcgctctgcctagcggatgccatcattgaatgtcatggcaaaatctcaccagaagttatcgggcgcaatatccttgcctgggctgaagggttcgatgcgttcaataaaaacgtgctgggtccgacttctaaaattgcgctcaatgccattcgcgacgcagtaccgatcgatgaactggagaacaacggcgtcacgaatggggcggcgatgcgcgtctcaccgctaggctgcctgctcgcaccaacacagctagacagctttattgatgaggtggcgctggcttccagccccacgcataaatccgacctcgcgattgcgggtgccgtcgtggtggcgtgggcaatctctcgggctatcgaaggagatagctggcaggctattgtcgactcgctacctgctgtggcacgccaggcgcaggaaaagcggatcaccacttttagtgcctcgctggctgcccggctggagttggctttgtgcgtggtacgtcaggcaaatggtattgaatcagcctgtgaggggctctatcagcgcgttggcgcaggcaccagtacccttgaatccgttccctgcgcaattgcgatggttgagctggctggaggcgaccctaaccgctgcgccattctgtgcgcaaatctcggtggcgataccgacaccatcggcgcaatggcaactgcaatttgcggtgcactgaggaggatttctgctatcgacgccaccctgaagcagcagcttgatgaagtgaaccaactcgactttacccgctacgccacggcgcttgcacactaccgagagcaacgggaggcatcatgaatctgatgcaacgattacccaccttaggcaacaagcgtcccatcaccatcgtcggcgcggcggtcattgatgtgattgctgacgcttacgccctcccctggcgaggctgtgatattgaactgcaacagcaaagcgtcaatattggcggctgtgccctgaatattgcggttgccctgaaacgtctgggaatggaggccgataacgccctacccgttggacaaggcgtatgggctgatatcatccgtaataacatggcccgggaagggctttccagccgcatcgacggcgtcacgggtgacaacggctggtgtcttgcgctagttgagccggacggcgaacgcacgtttatgtcgtttagcggtgttgaaaaccagtggaatcccacctggctggcgcaactaactgttccgccgcaaagcctggtgtcactttctggttatcaactggcatcgccctgtggggaggtgctggtgcactggctggaatccctgcgtgatattacaccgtatattgatttcggcccgcgcatcgctgatattcccgagacactaatgcagaggatcatggcctgtaagcctgttatttctctgaatcgccaggaggcggagatcgccgcagagcgctttagattacccgtggcaaccgaagcgtttggtcaggcctggctaaagaaattcgcaatgccgttgattgttcgtcatgacgaagagggtgcgtggtacttcagcgcggaagaacagggactggcagcgccgttccctgtggcggtagtcgatacaatcggtgcaggtgacagccacgtaggagggacgctagccggactcgcctcgggatggacgctgggcgagtcggtactgcttggtaatgcggttgcgtcctgggtggtaggacatcgcggcggtgattgtagcccaacgcgcgaagcattactcctcgcacacaaagacgtatagatcgctacgacagcggttgatgctgtattcaatcggccgctgttgttgatcgagtgcaacctgattgataaccagcaccggtattttttcatccatatgaatgtgcgactgaaattcggcatccggcatacgtgcactgacgcgcgagcgcgtacgctgcgggaagatatgctgactgcgaaaatagtcatacagcgacacgccgatagcatcaacatcatgaatcagttgggcaggaacccaggactcttctatggacacggcctcatcatccacatagcgaattcgcttgagcaaaaatacatcactttgcggggcaatcgccaattgcgtcgccacctcatccgggcagctcactatccgtttgttgacccacagagtgtcaggtttttttcctctgagcaccacctgctgcgaaaaaccgcgcgcctctttcaatgaatactcaaagatattattgatttgcgtaccgtagccgcgggctcgggtcaccaccccttcgtcttccagcgtccgcatcgctttgcgaacggtaatgcgcgacacccccgtcaactggctcaggtcgcgctcgccggggagaatattaccgtgctccagcgcaccactgcgtacagcatttttaaccgtttcagcaaacttcaggtacagcggcgtgttatccggcgctgcaatacgctcgttcagttgtgctatcaacagggtatgcgcttgttccatcgtgttttttcctggcgaaagtcaggaaacagtatacttttcgccaggcatgaagactaccaccatgcgtgaaaatggtgtaccggaccgatgccgtgccccacttccagcgaatccgcctgcgccagcgccgccgaaagccagcccttggcttccgccacggttcgcccccaatcctcgtaacgcggacgcagggccgccagcgccgccgacagcgtacagcctgtgccgtgggtatttttggtctggactctcggcgcggtaaagcgctgctccccgtcgcgggtaaagagccagtccgggctttccgcatcatcgagatggccgcctttcattaataccgctccgcagcccatgcccagcagcgctctgccctgctccagcatctcctgttccgttctggcatgcggcgcatccagcagcgccgccgcttccggcaggttcggggtaatcagcgagacctgcggcagcaggcgctggcgcagcgtctccaccgccgaggcggagagcagcggatcgccgcttttcgccagcatgacggtatcgagcaccacatttttaatctgataacgcgccagccgttccgccaccgcctcgacgatatcggtttccgccagcatccctattttggtggtatcgatacgcacatcgctgaaaacggaatcgagctgcgcggcgacaaaatcaggctctatccggtacaccgactggacgccgcgggtattttgcgccaccagcgcggtgatgaccgagcagccgtaagcgcccagcgccgagaaggttttgagatccgcctggatccccgcgccgccgctcgggtcggtgccggcgatggttaacgcattaattcgtttcacagatcgcctcccgcatagagcgcatcgaggaaggcaggagtaaagctgccggggccgccctgcagcgccgcttttccccccgcaagcttcatcagaccgcaggccgcggccacgttctccagccgatcgccgggcatcgccgcagcggcggcaaccaccgccgatagcgcgcagccggtgccgactacccgggtcatcagcggatcgccgccggtgaccgcgcgcgtgcgctgaccatcggtcacgtaatcgacctcgccggttaccgcgacaacggtattcagctggcgggccagcgcctgggccgcgggcagcgctgcggcggcggtatcggtcgtatcgacgccgcgcccgccgccgctcattccggccagggccataatttccgacgcattaccgcgaacggcggcaggctgcagcgccagcagctcccggcaaaattctgtccgtaaggtcagcgcgccgaccgccaccgggtccagcgcccatggtttacccgcctgctgcgcgctgcgcgccgccgcacgcatcgccgccgcgcgttcgacggtcagcgtaccgacattaatcagcagcgcatcggcaatggcggcaaactggctggcttcgtccgggtcaataaccatcgccggggatgcgccaatcgctaacaggacgttggcggtaaaggtctgcaccacgtcgttggtcatgcagtgaacaagaggagaatggcggtgaaaaaggtgccgcagatgggcaatatgcgcggggttcagcaggtcagacatcgtttgctcccgccaggcgatgaagaagcgacgaccctgcggtctctgacttccctacgctggcattatccagatcaggtggtacgggtttttctcagccttcacaaagaagggcaccccgagtcattgagagataaaaacgttctcagtgggcaggttacggtaagtcgcgggacaacgcaagccggccaggcgtaggtatacaagcgcgcggcaattcaaaattaacaataagcaatcaaataattaacaaaataaacacttttgcagatacgtgtttatagtttaggaggcgttacaggatgtaacccgacgtcatatcgaaattaacgagtgaatcagcgtaaacccatgaggattccgatgaaattaacaccgattatgaaaagtctggctctggcaggaattatctcgactctccctgtgaccagctgggccgaaacgtcgccgaaagaagccgctgcggcgaccaaacaggcaaacgacgcgctgtataaacagctccccttctccgacaacaccgactttaccaacgcgcataaaggttttattgccgcgcttcctacggaagtgattaaaggtgaacagggcaacgttatctggaacccgcagcagtacgcctttatcaaagagggggaaaaggcgccggatacggtcaaccccagcctctggcgtcaatcccagctcatcaatatcagcggcctgtttgaagtgaccgaaggcgtgtaccagatccgcaacctcgatctctccaatatgaccatcattgaaggtaaagagggcatcacggttgtggatccgctggtatcagcggagaccgcaaaggtcggaatggatctgtattacaaaaatcgcggcaataagccggtcgttgcggtgatctacacccacagccacgttgaccattacggcggcgtgcgcggcgtggtcgatgaagccgatgtcaaatccggcaaagtcaaaatctacgcgccttccggttttatggaagctgccgttgctgaaaatattatggccggtaacgtgatgagccgtcgcgccagctatatgtacggcaacctgctcaaaccggatgccaccggccaggttggcgcaggtctcggcaccacgacctctgccggcaccgtcacgctgatcgctcccaccaatatcatcgagaaagatggccagaaagagaccatcgacggcctgacctacgattttatgctggcgccgggctcggaagcaccgtcggaaatgctgtggtatatcgaagagaagaagctcattgaatccgccgaagatgtcacccataccctgcataacacctactcgctgcgcggggcgaaaattcgtgaaccgctgccgtggtcgaaatatatcaacgccgccattgtgcgctggggcgacaaggctgaaatcattatggcccagcaccactggccgacctggggtaatgagaacgtggttaacctgctgaagagccagcgcgacctgtatcggtacattaatgaccagactctgcgcatggccaacgagggcctgacccgcgatgagatcgccgccaaattcaagctgccggacagcctggccaatacctgggccaaccgcggctactacggctccgtcagccatgacgtgaaggccacctacgtcctctatctcggctggttcgacggcaacccggctacgctggacgagctgccgccggaagaagcggcgaagaagttcgttgattatatgggcggcgccgacgctatcctcaagaaagccaaagaagattacaaccagggcaactatcgctgggtagctcaggtagtcagcaaaattgtcttcgccgatcccggcaatctggaggcgcgcaatctggaagccgatgccctggagcagctgggctatcaggcggaatcaggaccgtggcgtaacttctacctgaccggcgcgcaggagctacgcaacggcgtcgtgaaagggccgacgccgaataccgccagcccggataccgtgcgggccatgactccggaaatgtttttcgactatcttgcggtccatatcaacggcgaaaaagccggaaccgccaaagcggtattcaatatcgaccttggtaacgatggcggtaaatataagctagagctggaaaacggcgtgctcaaccacaccgccgatgccgaagccaaagacgccgacgctaccatcgcgctggatcgcgccacgctgaacaaaatcatcctgaaagaggaaacgctaaaacaggcggaggataagggtgaagtcaaagtgaccggcgacggcgcgaagctggacgagatgctgggctatatggataaatttgagttctggttcaatatcgtgacgccgtaaataagctcccgcggcggccagctgcgggacttaatccgtccggagtttcatttgctttcccctcgccgcaggcacaaaattatcagcaggtatcaccctgcgtcgaggtatcgttatgtccgtttatcaccatgctctggtgctgatcaacagcagccttgacggcgttccgctgctggcgcacgccgcgaaaatggcggaagagaacgctatgcgtattaccatcgcccatatcagcaccgactaccggtcgcttaattatgtctccgacagcctgctggatgatgacgtttcccgggaggtgattcaggccaaagcgctgctcaatgaactggccaccacggtcgccctaccggtgcaaacgctatcgctggtgaccacgcgtcgttttgccgatgtcgaagcgtgcgtgcggcagcggaatattgatttgatcattgccggtcaccacaaccggctgctgggcgttctcgcttcacactccctggagtacattaatcatctcaccgtcgacgtgctgattaagcatcttccctgacagcctctcccgcagacggcgcgctgcgttcgtcgggctcccccccgcgccggtcagcgcagcgaacttagcaataatgcgaaacattcctcaatcagcggcggcaaaggctgcggcccgcgcatcagcgccacggttcgcgtcagcgcgggctgctgaagctgcgccacctttaacgccggatcctgaaggtgggtagtataaagctcaggcagaatcgccaccgccagccgggaacgcaccaggccgtaaagcgtttcaatatagtcaacctgataacgcgtattcagcgtgaggcgatggctctccgccagcgcgccgaccagacgctgaatattgccctttgagaacaccgcgatatcgcgccccgcgagcagcttccacggcagatgcggctgcccggccagcggatcgtcacagtgcagcaccgccacaaacggatcgtcgcgcagaggataaacctgcagctcaggcggtaacgaactgtctattgcgccaacggcaaaatctatctttcccgactgcagctcgcaaaacagggcgtcgttggtctgatcgtgaaactccactctcaggcgcggaaacgcctgggccagcgtttgcggcagcagcggaaacagcagcgagctcaccgagggcaccagcccgatacgcaccgtaccgtcgccgccggcctcgactatctgctgcatatcctgaaacgccagctgcgccacgctcagcacccgccgggcgtggggcaaaattgccgcccccagatcggttaaggtcaccgccgaggcggtgcggttgaccagcttgccgccgagcaccgtctcgatttgccgcagcgcgctgcttagcgccggctggctgatagccagccggttggcggtgtcggtgaagtggcgtagctgggccagggtcacaaagtactggatctgcttaagggagagcgcgggcagacgctgccagggttcagtcatcatgttttcatcaatggtgagcatgcagaataacccgaggttatcgggcgataaatttattcatctgggcaaacgtttgctctgcccctagagtatccccattatccttgtgccggagttgttatgtccagcagtgctgaaacccgccgccgcgccgtgcaggccgcacgcggcgaatccccgttcgatctcttattaaccgacgcgcagattgtcgatatggccaccggagagatccgcgaggcagacgtcgggatcgtcggcgaaaccatcgccagcgtgcacccgcgcggcagccgctccgatgcccacgaacgccgctcgctggcgggatatttcctgtcgccgggtctgatggacacgcacgtccaccttgaaagctcccacctgccgcctgaacgctatgccgaaatcgtgctggctcagggcaccacggcggtattctgggatccgcacgagctggccaacgtgctgggcgtcgaaggcgtgcgctacgccgtcgccgccagccgccatctgccgctgcaggtgatggtcgcggcgccgtccagcgtgccgtcgacgccgggactggagatgtccggcgccgattttgccggcgcggagatggaaaccatgctggcctggccggaagtttgcggcgtcgccgaagtgatggatatgcacggcgtgctgcacggcagcgagcggatgcaggagattatccaggccggtctcaacagcggcaagctgatcgaaggccacgcccgcggtttgcgcggcgcggatctgcaggcctaccttgccgccggggtcacctccgatcacgagctcacctcggcggatgatgcgctggaaaaactgcgcgccgggctgactatcgaaattcgcggctcgcacccttacctgctgccggatatcgttaccgcgctgaaaacgctgccgcatctctcctcgcaaatcaccgtctgcaccgacgatgtgccgccggatatgctgctggaaaaaggcggcattatcgccctgctcaacctgctgattgagcacggactgccggccaccgacgtcctgcgcttcgccaccttaaacgcggcgatccgtctgcagcgtaacgatctggggctgattgccgccggacgccgcgccgatctggtggtttttgattcattagaaaagctcgacgcgcgggaggtgtacgtcgccgggaagctgattgcccgcgagggcgccctgcttgagtcgattccgccggcgccgggtattaccccgccgcgcgataccctgcagatgccgccgctcagccctgacgattttatcctccgcgtcggcgcgattcgccacggcgtcgcccgcctgcggcatattcgcggcgcgcgctttacccagtggggagaggttgaggtgcaggtccgcgatggccgggtgcaaatcccggacgggtttagcctgatttgggttaagcaccgccacggtcgtcaccaggcgacgccgcaaattgcgctgctggaaggctggggcgagctgcgcggcgccatcgccaccagctactcccacgattcccacaacctggtggtgctcggccgcgatgccgacgagatggcgctggcggcaaaccgcctgatcgcctccggcggcggtatggcgctgtctcagcagggaaaaatccttgcccacgtggcgatgccgattgccggaatgctttccgacttgcccgctccggagctggccagacagttccgccagcttcgcgacctgagcgcggaggtcgccgactgggagccgccctatcgcgtatttaaggctatcgaaggcacctgccttgcctgtaacgccgggccgcatttgaccgatttaggtttgaccgacggcagcacccgccagatcgtcgagccgctgatagactgccgggaaatcccggaacacacagaacacaacaataatcatcagggagcctgagcatggccgacaatacccttcattcatccacgcaaggaagctggctggagcgccgttttgccttgtattcccgcggcagcacgctgcgcaccgaatgcctcgcgggcatcaccggctttctcgccgccgcctacctgctggtggttatccccggcctgctggcggttggcgggatggataaaggcgcggcaaccaccggcacgattctggtgttcgtcggcggcacgctgctgatggcgttttatgccaacctgccgtttatcgtcgggccgggcatcggcggctcggtgctggtcggcgtcacgctggcgggcagcgaaggcattggctggcaggttggtcttgggatcgcctgctggtcggggattctgtttttcctgctaaccaaattcggcctgcgtgaagtggtgacccgttcggtgccgcagtcgatcaagctcggcctgacggcctccattgggctgtttgtcgcggtattgggtttccgtaacgccgggctggtgctggctaacgccaaaaccaacgccctgatgctcggcgattttctctcaccgggggcgctggtggcgctatgcgggctgtttctggccattgccctgcaggcgagaaaaatccccggctcaattctgtgggcgattctctttgccaccctggtcggcattccgatgggcgtcaccagactcccgggcagctttatcgatatgccgcattcgctgacgccggtgctggggcaaatcgatatgctgggcgcgctgaatatcgtcttcctgccgttcctgttcgtctttttcgcctcagagttcttttccacgatgggcaccacgctggcggtaggcggcgaagcgggtctgctggatgaagaaggcaatatgccgcatatcaatcgcccgtttatggttgattcgatcgccgcagccgttggcccctggctgggcattccggcggcgaccgcgctgattgaatcctcagcggcagcggaagccggcggtaaaaccgggttaaccgcgctgtcggcggcggtgatgttcctcctgatgctgctgtttaccccggtggcgctgatgatcccgaaagaggcgaccgcgcctgcgctgatcctcattggcctgaatatgttcagcggcctgcgcaaagtggacctggcaaacttcaccgacggcctgccggtgctgatgatggtgatgattacgctgattgccaatagcttcgggaccgggattgccggcgggctgctgttttatgtggtgattaaaacgattgccggcaaatggcgggaaatccccatcgggctgtggatccttgcgattccgctggtctactacttcgccacgctggtgaagcattaagcttcgcaccgatcgttctcccggaggcggcgctggcgcgcctgtccgggctaccaatccgtagcccggctaagcgcagcgcgaaccgggaaaaagccgcgccgatgcatcaccccgacaccgtcccggaggcggcgctggcgcacctgtccgggctaccactccgtagcccggctaagcgcagcgcgagccgggaaaaagccacgccgatgcatcaccccggcaccattcccgagtcggcgctagcggcccgcagagggcgcgcgggaatgaaccgcttcgcacgcctctttcaccgcctcatacagcagccgtaccgcaggcgaaagctgcttgcggtgcgggcaaatcatattcagcggcaccacgtcgccctgatactccggcaacagcacctggagccgcccttcacggatatcatccccgacgtcgagttcagatttgaacgcgatcccctccccggcaaccgccaggcggcgaatcacctccgcatcatcgctcacgatagtgccggcaacctgcacgtaatggaccttcccgtccaggctcagcggccagcgatcgaacgccctgccgcgcagcacgtaggtcagcgcattgtgccgggccaaatcttccagcgtcttcggttcgccgtgttcggctatccagccgggcgaggccaccagcatccggcggttctccggcgcgacgggcagggaaataaacgaggcatcgtcgttatcgccgtagcgaaacgccacgtctaccggatctttaaatacgtcggtccgatgatcggaaaacagtatccgcaggcgcagcgcgggatggcgctggcgaaaagcgcgaaacacgcgcagaagcaagttgcgccccaggtcggacggcacggcaatttgtaacgtaccgcgtacttcgtcatccggcgtgctgattttttgcagccccgcgtgcagcgtatcaagcatctgcgtggcatagggcagccaggtttcgccttccggcgtcaggcgtaaactccgcgtcgaacgggcaaaaagacgaatattcagcgtcgtttccagacgcttgatcgccgcgctcacctgcgcgggctgcagcccggcctctcgcgccgcatcgctgaagctgcttaacgccgcagcgcggacaaacaatgccagatcttccagccggaacatacacactcctcaacccggattattctcaaaacaggcgcgcgccgatgaaaaacggcgctgcatcaccgtttgcttacacttttaaccaaaccaacgcttgccaatcccttgacgtatcaggaatcatacgaggctgcgattttgtgtccaggataataatggggaaattatgcgtaaaacaaaaatgatgcttctgggcgtactgttggcctgcgccagcggagcgtgggcggcgaccggcgaaggtatacagaaatatgagctggatggggtcactgcggacttcaaacaatttcacatcggcgataccgtcccgccgctgtacctcacgccagaatacaacatcaagcagtggcagcagcgcaatttgcctgcgccggatgccgggacccgctggacctatatgggcggaagctacgtgctgattaccgaaaccgaggggaaaatcctcaaaatttatgatggcgagattttctaccatcgctaaaagctgaacgccagcgcgctctccctgccgctggcgtttttttgtggcaaagcgctattcgttaaagcggttctgtttttgcataaattcctcgacggcaatatatgaagcaacctgctcatagagcattaaaatacttaatatcagatcgccaccgctacgcagtaaatcatccggggccgtacgactcttgtcatccgataaaaaaacaatctgttcaaaaatatcactgtactcaccataagcgccaatcggaatctcagctatcgggagatgctcctggcaataacgcaacgcgtctgctgctttctccggcagcgagcgcgtatgcataaaaataaccagtagttctcgtaacttaacgattagagcaatattattcatcatgcactccggaaatgtgtacggctatactttccttccatcgtttttatatacgtattactgataacatccacgtttcgccaaataaaaagccaaaattaaacctcatcacggcgaattaaaatcatacttctttgctattaaagctcgcacaaccgccagaggaaaacaatgttagcaatatgttttattgattaatctcaatatcgctaaatgtgaataaaaataaataatatttaacagcaatattattcgcgcggtgattatctcctcggtagagaaccgggacggaaaaaaataaaaaaccgcacggcgaaaagcgccgggcggctcaggagggtgaggagattagaccgcgcggaaggctatctctccgggaatgacttccccctgccagtacagctgcgccgcgacgcggtcggccagctggcggtaggtctcggtaaactcgctttccggacgcgcaaccaccgtcggcgtccctttgtcgaggtcttcgcgcagagtgatatgcagcggcagctggcccagcagctgggtatgatatttctccgccagcttctgagctccgccggtaccgaaaatcggctcgtggtgtccgcagttgctgcagatatgcatgctcatgttttccacgatacccagcaccggtacctcgactttttcaaacatcacgatgccttttttggcgtcgatcagggcaatatcctgcggcgtggtgacgacgaccgcgccggtgaccggaatgttttgcgccagcgtcagctgaatatcaccggtgcccggcggcatatccagtaccagataatcgagatccggccacagcgtttcctgcagcatctgcatcagcgccttgctggccatcgggccgcgccacaccatggcgttgtcgtcggtcaccagataaccgatggagttggtagcgagaccgaatttcataatcggcgccatatgggtgccgtccggcgaagtcggacgctgatcttccgcgccgagcatggtcggaatcgacggcccgtaaatatcggcatccagaatgccgactttcgccccttccgccgccagcgccagcgcgaggttgaccgccgtcgacgatttacccaccccgcccttgccggagctgatggcgataatgtttttcacgccgttgatgcccggctgattttttacccgctgaagcgtggcgatgctgtgcgtcagcttccagtcaatggctttggcgccggtaatgcgcagcagctcggcgctgcactgctccttcagcgcttcaaacgcgctgttccagacgaacggcatctgaatttcaatgtgcacggtctcgtccagccaggcgacgtgatgcagcgccttcagcgtagtgaggttatgtttcagggttgggtgctggaaattagccagggtcccggcgaccatcgcgcgcagacgctcgggggatttggcctgggattgcgaactcatcccgactcctttgttattgtgagttgaatcttgtgcgttaagtttaccttaaagggaataattcccccaccataagctttgggcttaccaaattattgcctttgcggtaacatcaaaacccctttttacaatagaagatgtaatgcccactatgactcaagtcgcgaagaaaattctggtaacgtgcgcgctgccgtacgcaaacggctcaatccacctcggccacatgctggagcacatccaggctgatgtctgggtccgttaccagcgaatgcgcggccacgaagtcaacttcatctgcgccgacgacgcccacggcaccccgatcatgctgaaagcgcagcagctcggaattactccggagcagatgattggcgaaatgagtcaggagcatcagaccgattttgctggcttcgacatcagctacgacaactaccactccacgcacagcgatgaaaaccgcgagctgtcggagctcatctacacgcgcctgaaagagaacggttttatcaaaaaccgcaccatctctcagctttacgatccggaaaaaggcatgttcctgccggatcgctttgtgaaaggcacctgtccgaagtgtaaatcaccggatcagtacggcgataactgcgaagtgtgcggcgcgacctacagcccgaccgagcttatcgagccgaaatcggtggtatccggcgcgacgccggtgatgcgcgagtccgagcacttcttcttcgacctgccgtcgttcagcgaaatgctgcaggcgtggacccgcagcggcgcgctgcaggagcaggtggcgaataaaatgcaggagtggttcgagtccggcctgcagcagtgggatatctcccgcgatgccccgtacttcggcttcgaaatcccgaacgcgccgggtaaatacttctacgtctggctggatgcgccgatcggctacatgggctcctttaagaacctgtgcgacaagcgcggcgacgccaccagcttcgacgagtactggaagaaagactctaccgccgagctgtaccactttatcggcaaagacatcgtttacttccacagcctgttctggcctgcgatgctggaaggcagcagcttccgcaaaccgaccaacctgttcgtacacggctacgtgacggtcaacggcgccaagatgtccaagtcgcgcggtacctttattaaggccagcacctggctgaatcattttgacgccgacagcctgcgctactactacaccgccaagctctcgtcgcgtatcgatgatatcgacctgaacctggaagacttcgtgcagcgcgtcaacgccgatatcgtcaacaaggtggttaaccttgcctcgcgtaacgccggtttcatcaacaagcgtttcgacggcatgctgtccgccgagctggccgatcctcagctgtataaaaccttcaccgatgcggcagcaagcattggcgatgcgtgggacagccgcgagttcgggaaagccatccgcgaaatcatggcgctggccgacgtggcaaaccgctacgttgacgaacaggcgccgtgggtggtcgccaaacaggaaggccgcgacgccgatctgcaggccatctgcaccatgggcctgaatatgttccgcgtgctgatgacctggctgaagccggttctgccgcagctggccgcccgcgccgaagcgttcctcaacggcgaactgagctgggatgctatccagcagccgctgctcggtcacaaggttaacgcctttaaagcgctgtataaccgcatcgaaatgaagcaggttgaggcgctggtcgaggcgtcgaaagaagaagtgaaagcgctgtcagcgccggtcaccggtccgctggcggacgatccgattcaggaaactatcacctttgacgatttcgccaaagtggatatgcgcatcgcgctgattgaaaacgccgagttcgtcgacggttccgataagctgctgcgcctgacgctggatctcggcggcgagaagcgtaacgtcttctccggcatccgctccgcctatccggatccgcaggcgctgattggccgcctgacggtgatggtcgctaacctggcgccgcgcaaaatgcgcttcggcatctctgaaggcatggtgatggccgcaggtcctggcgggaaagatatcttcctgctcagcccggacagcggcgctcagccgggccagcaggtcaagtaaggctgtataaagcgctgctccggcagcgctttttttttagagcgccacgatattgtcgacgacatcgcccgccgggtgctggcgcagaaagaagaaaacgctggcataggcgcgaaacggcgacttccgaggatacgcccggcaccatcgcccaattctgtatacaattagagatgatgattgattaacaaggaatgataatgaaatttaaccgcaggatgaccgccgctctgggcgccacgctattgatggccgcgcttgtcggctgcgataacaacaaagatgaggtcaaaacgtttaacaatacgatcaacggcgttgatctgacctacatctatcactataaaggcgatgtcgtcacccgccaggacgcggagaatactatcccctatcaatcactcggggtaagtaacgaagagcaggcgcgcaaggtcatcgaccctatcggcgcggcctacagcaaaatcaaaggcgttacccacagcgtcgactataaagagaacgtcgcgcaggaacacctctccatcgacttcaatcaggctaaaatcagcgagctgtgtcacttgccgggggccagtttttccgactgttcacaaaagttcatttcgctgagcgagtcggagaaattgctgaaatcgcagggttttaaagaagtgaaacagccctgactggtgcggactactcccggcttgcgctgcgctgagccgggctacggagccgtgcgttcagtagcccggctcaggcgtttacgccgcaagccggggaggcatatcaggatttcgcgtgttcgcgctcggtcagtccgcgcagaaagtagcgcaggaactggtcgccgcattcgcggaagtttttatgatccggggcgcgcatcatggcggtgatttccggcatggagacgcggaatttctgctgggtgaggatagcgagaatatcatccgtcttcagggagaaggcaatacgcagctttttcagcacgatgttattattcacccggcgttcgaccgccagcggcggcgccgacgcatctttaccgcgtttgtcgtaaatcaggccgttgaggaaattcgacagcacgatatccgggcagcgcacaaacccctcttcgtcttcttttttcagccagggaaccagctgttccgcgctgaccggcgcatccgccagggcaaaaatacgaaccaggccgctgttattggttttcagggtgtagcgcaggctacggagaatatcgttactgatcatattgccttcatgatgaaaaaatctgccgctaagtctatcacgattccgccgttttacagcccaatcgcctctttcaggctcttcaggtagcggcggctgaccggcaccgtttgcccggcgcgcatcagcagctccgcctggccgttctcctcaaagcggatctccttgagatgggacatgttgaccaggtactgacgatggcagcgcagcagcggcgttcggctctcgagcgtgcgcagggtgagctcggtaaagccctccttcccttcgcggtcggtcacgtaaatcccgctcatccggctgctgacgaaggccacgtcttccatctgcagcagccagatccggctgtgtccggtgcagggaatatactttagcgcctgctgggtatcgtcgagcacggtgatatcctgcaggctgcgctcctggcgcaggcgaaacagcgttttttccagccgggcggactcaatcggcttcagtaaataatcaaacgcgtgctcttcaaaggccttcaccgcgtactcgtcaaacgcggtaaggaagacgatatagggccgatgctgcggatcgagcatgccgaccatctccagaccgctgatgcgcggcatctggatatccagaaacagcacgtccgggcgcagcttatgcaccgcgccaatcgcctcgacggcattcccgcattcgccaacgatctcaatatcaggctgggtctccagcaaaatacgcaggttttcacgcgccagcggctcgtcgtcgacaattaatacttttaacatgcgctttcctccagaggcagtctcagcgtgacgcgggtaaaacattccggctcgcaggttacggtgatcccgcagtcggtgccaaagcgcgcccgcagtctgcggtcgaccaggttcatgcccagcccgctggcgctgggtttgtcctgatacagcccggcattatcttcaatatccagctgcagccagcgctcttgctgactggcgcggatagtgatttcgcccaccccaaggtgctgcgaagtcccgtgtttaatcgcgttttcgacgattggctgcagggtaaacgccggtagctgatgctgccccagcgcctcgggcaccagcatatgaatctgcaaattggtctgaaaacgcgctttctcaatctgcaaataggcgttcacatgttcgatctcatccgccagggtcacgatctccgctggccgcttcagatttttgcggaaaaaggtcgacagatactgcaccagctgcccggcctggtcgctatcgcggcgaatcaccgctttcagggtattcagcgcgttgaacaggaagtgcggattcacctgggcgtgcagcagcttgatttccgactgcgtcagcagcgccttttgccgctcatactgtccggccaggatctgcgccgacagcagctgcgcaatcccctcccccagcgtgcggttgatggagctaaacaggcggtttttcgcttcatagagtttaatggtaccgatgacccgctgattttcgccgcgcagcgggataaccagcgtcgagcccagcttgcagttcggatgaatcgagcagcggtaaggcacctcgttgccgtcggcgtaaacgacttcgccggtatcgatcgccttttgggtatagagcgaagagatgggtttgcccgggaggtggtgatcgtcgccgatcccggtaaacgccagcagcttgtcgcgatcggttatcgccaccgcgccgatatccagctcctggatcagcacctgcgcgaccttcatgctgttctcttcgttgaacccctggcgcaggatcccctccgtcgaagcggcgaccttcagcgccgtagccgaaaaggccgaggtatatttttcaaacattgctcgcttatccagcaggatgcgcataaatagcgccgccccgacggtgttggtgaccatcatgggcgcggcgatgctttgtaccagatgcagggcatcttcgaacgggcgagcgataagcagaataatcagcatctgcaccatctcggcgaaaaaggtgatcgcgccggcggtgagcgggctgaagactttgtccggccgcccgcgtttgaccagaatactgtgtaccagcccgccgagtagcccttctacgatggtggataccatacagctcagcgcggtcatgccgcccagcgagtagcggtgaagcccgccggtcagccccaccaggccgccaaccaccggcccgcccagcagcccccccatcaccgcgccgatggcgcgcgtattggcgatcgagtcttcgatatgcagcccgaagtaggtaccgaggatgcagaaaatggagaaggttacgtagcacaggagcttatgcggcagccggacggtgacctgcattaacgggatgaacagccgcgttttgctcatcagccacgcaatgaccaaaaacacgcacatctgctgaagcagcagcaacaccagatcaaactcgtacatacccgcagaccacacttcatttgaaagcgcgtaacatacactgcttgcttataactttctttgaagcaatacatgaaaatgataattcatgttcaggatcacatttcttcgcgtctcgccggcccagatttgtacaaaaaacagacaaaaattcccgcttcggcaaacagcttctacagttaatggaggagaacacagcgggaggagaaaatggcgctttatacaatcggcgaagtggcccagctttgcgatatcaatcccgtgacgttacgcgcctggcagcggcgctacggattactgaaaccccagcgtaccgacggcggccaccgcctgttcaacgaatatgagatagaccggattcgcgaaattaaacgctggattgactccggcgtgcaggtagggaaagtgaaaacgctgctgatggataatgagcaggaggtggccgacggctggcgcaagcagcaggaaattttgctcggttatctgcaaaacggtagctatcatcgcctgcgtatgtggcttaaggagcgcaaccacagcgagtcagcgcaaattctggtgaagaatctgattaatccattacgccagcgcctgcttagcccgcagcccacgctgctggcgctgcggggcatccttgatggtattctgattaatcatatcgcccgcactctttcatccacggcaaaatatcccggcagccatgcgctgattatcggctggaatgtgaatgatatcacccggctatggctggagggctggatagccagcgaacagggctggcgggtggacattctcgcccattcgctgaaccagctccgaccggagcttttcccggagagtacgctgatggtctggtgtggagaagcgccctgtagcacccaggtcaatcaaatgcgcctctgggagcagcaggggcagattatctggctgaatcacgccaccgccacgtctcccggaggcggcgcctgacgcgcctgtccgggctacgggttaccggcaatctgtggccgggtaggccgactaagcacagcgcaagccgggtagaagccgcagcaatgctacgtcacggcatattccccgggttgcggcgtaaacgccttacccgggctacgggcccgcagacggtgatgaaccgaagcccggctaagcgcagcgcaagccgggtagaagccgcagcaatgctacgtcgcggcacattccccgggttgcggcgtaaacgccttacccgggctaccggcccgcagacgttgatgaaccgtagcccggctaagcgcagcgcaagcgggtagaaaccgcagcaatgccacatcgcggcacattccccgggttgcggcgtaaacgccttacccgggctaccggcccgcagacggtgatgaaccgtagcccggctaagcgcagcgcaagccggggggttgtcgtagctaaaaagcaattaatgttttattaacacctgcgcttcaccgtataatccctgcgttaacatcaggagcctattatgaagccagcgaaaattgcggtgattaccctgttcttatttatggccatcagcggcatcggcggcgtgatgctggccggttattcatttattgttcgcggtggtgtcggctgattcgccggttcagccgttcaaacccccggtcgacgataatcgccgccagcgccaccagcagcgccccctgaatcacataagcggtattaaatccgctgaggccgataacaatcggcgtgccgagcgtattcgcgccgacggttgaagcaatggtcgccgtaccgatattgacgatggtcgaggtacgaattccggccagcatcaccggcgccgccagcggcagctcaacttttatcagcctctgccagccggtcatccccattccctgagcgatagctaaaacaccggacggtaccgccccaatcccggccagcgtgccctgcaaaaccggtaagatgccgtacagcaccagcgcaataagcgcgggctgccagccaaaccccatcaccggaaccgcaatcgccagcaccgcgaccggcggaaacgtctgccccattgcggcaatcgtctccaccagcgggcgaaactcatgccccgccggacgggtgaccgcaatcccggcgacgacgcccaccaccgtagccgcgaggctggagagcgccaccagccaaaagtgcgccagggtaagagaaacaaaactctcctgttgataaaccggacgcggcagttcgggaaacagcgcgctgaacagcggcgcgctgtagggcaacgccagcagcagcgcgataaacatggcgctgagccacagcagcggatcacgcagcaccttcacgccgggcctcctcgcgcagcaggtcggcaaaatgcagcgtcccgcaggcctctccctgctcatcgaccaccggcagcacctcgcggcgatgagcaacgaactgcgacagcgcctcgcgcagggtcatcgtcacgttcaacgcgtcccccgccaggcgctcatcgcggcgcagataatcactcacgccgcgtagcgacagcaggcgcacgcccagttcgctacggccaaagaacgtctccacaaacgcattttttggctccagcagcatctgcaacggctcgccctgctgtaccacttcgccgccgtccatcaacaccagatggtccgccagccgcagcgcctcatcgatatcgtgagtcaccagcacaatagtgcgtcccagcagacgatgaatgcggatcatctcctgctgcaaggcttcgcgcgtcaccggatcgagcgcgccgaagggttcatccatcagcagcacttccgggttggccgccagcgcgcgcgccacgccgacgcgctgctgctggccgccggaaagctgatgcgggtagcgttcgcgcaggcccggctccagccccagcaaggccatcagctcatcgacccgcgcctgggtcttctgccgcgaccacttttgcagctgcgggacggtggcaatgttctgcgccaccgtccagtgggggaacaggccgatggactggatggcgtagcccatcctgcggcgcagttcgagcaccggctgctggcgaatatcctgcccggcgaaacggatcgtcccgctgtcgtgctccaccaggcgattaatcatcttcagcgtggtcgacttccccgagccggaggtgccaatcagcaccgaaaatgccccctcgcgcagatgcagattgaggtttttcaccgcaggctctccggcaaaggctttattgacgccgtcgaactcaatcacgggcctctcctttcagtaatgcgccccacagcgcgaataacgcatccaccaccaccgccagcgcgatggtcgggataacccccagcagcaccaggtccagcgcgctgctgagcagcccctggaaaaccagcgcgccgaagccgcccgcgccaatcagggccgccaccaccgccatacccacggtttgtacgctgaccacccgcaggctgcgcaacaacaccggcaacgccagcggtagctgtacctgacgaaagcgctgcccgccgctcatccccatcgccgtcgcgctctccagcgcttcgcgcggcacctgctgaaggccgatcgtcaccccgcgcaccagcggcaatagcgcatacagcaccagcgcaatcagcgccggcgtgatgccggtgccggaaacgccgagctgcgccagcgacggaaactggcgcgccagcccggccagcggcgcaataagcaggccaaaaagcgcgacggagggaacggtctgaatcacgttgagaacggcaaaaaccggcgattgccagcgggggtagcgccagagccagacgccaacgggcaagccaatcagcagccccggcagcagggtccccaacagcagcgtcacatgctgggacagcgcatcgtcaaacacctcgcggcgattgaaatactctttcagcaaagagaggccatcgagcgcgccgagtcccagcagcagcgcgggcagcagccagacctgcgcgttcagcagccagcgccacagggctcgggtcgtcaggcgacgaacggcatcgctggcgataagcaggcacagggccagcgccagccacaggccgcttcccggcgaggtgcgggccagcggagaaccgctctgagccagctgtaccgccgcactgccggctccccatagcaataaaggcagcagcagatccgccagcaggaagataaccagcagcgggagacgcccgggacgccagctcagcagcgctatcagcagccctgccgccccctgtacgcccgccagccacggccagacctgccatagccagcgcccctcgccggataacagccggttaggcgcatagttgataaacggcagcgccatcgccagcagcaggaggaatgccagcagcagcgcaacccggttacagcaacgagtggtcacgcgcgccctacttaagcagccctttctgttgcagatagtcggcggcgactttcttcgcatccaggccctcaaccgcaatactggcgttcagcttttgcagcgtcttttcatccaggctggcgaagaccggctgtagccagtcggctatctgcggatacgcttttaacaccgcttcacgtacgaccggcgtgggcgcataaatcggctgcacgcccttcgggtcgctcagggtttgcagacccagcgcggcgaccgggccatcggtaccgtaggccatcgccgcattcacgccggaggtttgctgcgccgccgctttgatggtgaccgccgtatcgccgcccgccagcgacagcagctgattttgcttgagcgtgaagtcgtaggctttttcaaacgccggcagcgcgtccggccgttcaataaattccgccgaggcggccagcttaaagtcaccgccctttttcagatagccggcaaggtcgcttaatgaggcgaggtggtttttctccgccagatcctgacggacggcgatagtccaggtgttgttggccggagccggggtaagccagacgagcttattcttttccgcatccagctttttaactttttcatatccctgctgcgcgtttttccacgccgggtcgttctcctctttgaagaagaacgcgccgttgccggtatattccgggtaaatgtccagctcaccggcggttatcgccccgcgcaccaccggggtggtgccgagctggattttattgacggttttcaccccatggctttccagaacctgcaaaataatattgccgagcagcgccccttcggtgtcaatttttgagccgaccttaaccggctccgccgcctgcagcggcaggcttatcagggccgccagcgccagcgtgccggaccacattcttgccttaatcatcctcgcgtccctctttaatttgcgctccattaacaggagcttaagcaaaaagcgtagttcatttggggcggagcggaaaaagaaaaggccgataaatcggcctttggggtaaggaatgcctgttcccgggtggcggccgcagcctcacccgggcgacaaatcaccattacagcagttcaaactcgctctgcttcacgcgggcggagtcgacgccgataaagacgttgaatttacccggctcggcgtcgtacttcatctgctggttccagaacttcagcgcttcaacgtcaatcgggaagctgacggtttgcgtctcacccggcttgagggtcacctttttaaagccgcgcagcattttcaccggacggctcatggaggcggtaacgtcctgcagataaagctgaatcaccgtcgccccttcgcgcttgccggtattggttacctgcacgctggcggtcacgctgccgtcgcgctgcaggatcggcgccgacatttttacgtcggaaacgctaaaggtggtgtagctcaggccgtagccaaacggatagagcgggccgttggcttcatcaaagtagcgcgaggtgtacttgttcggcttatccgcattgtacgggcgaccggtgttgagatggctgtagtaggtcgggatctgccccaccgagcgcgggaaggacatgggcagcttgccagacgggttgtagtcgccgaacagcacatcggcaatggcgttgccgccttcggtaccggcaaaccaggtttcgaggatcgcatcagcctgctgatcctctttcaccagcgccagcgggcgaccgttcatcagcaccagcaccagcggtttaccggtcgctttcagcgcgctaatcagggcgcgctggctcggcggcagggtgatgtcggtgcggctggaggcttcgtgggccatgccctgcgcctcgcccaccacggcaactaccacgtcggactgcttcgccgccgccacggcttcgtcaatcatctcctgcggcgagcgcgagtcaacctgcaccgctttctcgtacagattgaggaagtcgacgatgcctttatcgtcagtgacgttagcgcctttggcatagataatcttgcctttgtcgcccagcgcgttctgcaaaccggtcagcacggtgaccgactgatcggccacgcccgccgccgaccagctgcccatcatgtcgcgcttgctgtcggccagcgcgccgattaccgcgatagtgcccgattttttcaacggcagcgtatcgaggcggtttttcagcagcaccaggctttcgcgcgccacttcgcgcgcttctttgcgatgcaggcggctttcggcgttggtatcctgcggatcggaatctttcggccccaggtggctatacgggtcgttaaacaggcccatatcatatttcacgttcagcacgtggcgggtcgcgtcatccagctccgccatcgtcaccttaccggacttcaccagtcccggcagatacttgctgtagtactcgtcgctcatgctcatattgatgccggacttcagcgccacgcgcaccgcgtcttccgggtccgacgccacgccgtgtttgatcagctctttgatagcgccatggtcggagacggtgatgcctttaaagccccactggtcgcgcagcacgtccttaagcagccaagcgtcggaggtcgccggggtaccgttgagcgagttgagcgccaccataaccgcgccgctgcccgcatccagccccgctttgtagggcggcatatagtcgttgaacaggcgctgcgggctcatatcaacggtgttgtactcttttccgccctcgaccgcgccgtaggcggcaaagtgcttgacgctggtcatcaccgaatagcgatccgccgggcttttcccctgcatcgacgccaccatcgccctgcccatctcggtggtcaggtaggtatcttccccgaacccttccgaagcgcggccccagcgagggtcgcgggagacgtcgaccatcggcgcccaggtcatgttcaggccatcatcggccgcttcgtaagccgacacccgcccgacggtgttcaccgcgtcgaggttaaaagaggaggccaggccaaggctaatcggaaagacggtacgctggccgtggagcacgtcataggcgaaaaagagcgggattttcaggcggctgagttccatcacctgatcctgcataatgcggatatcgtggcgggtcacggtgttaaaaatcgcccccacctggccttctttgatcatctcgcggatggcctctttcgggttatccgggccgacgctaattaagcgcagctgaccgattttttcatccaccgtcattttcgtcagcagttccgtcacaaacgcatcccgcgcctgcggcgttaggggatgattgccgaacaattcatccgccagcgccggttgcagcgccaggctcacagcgacgcctacagtacaaagccatttcatttttatccctcattgttccagtcgaccagatcggcgaaaagatagcaaaaatcgaagtctgccataaacataaacgagacgcctgaataaagcgcgcgttgttctctgatttttcgaaacattgatgcatcaaattgtcatacaaagcgctattcttatttttgataattttgtaccaccacaaggagtggaacatgtcatctgcaacaacctataacaacgcttttctggctgaactcgcccgtctggtcggctcgtcccatctgctcaccgacccggctaaaacccagcgctaccgtaaaggctttcgctccggccagggcgacgcgctggcggtggtctttcccggtaccctgctggagctgtggcgcgtgctgaacgcctgcgtcaacgccgataaaatcattctgatgcaggcggccaacaccggcctgaccgaaggctcaacgccgaacggtaacgattatgaccgcgatatcgtcattatcagcaccctgcgcctggataaactgcatctgctggataaaggcgagcaggtgctggcttatcccggcacgacgctctattcgctggaaaaagcgctgaagccgctgggtcgcgaaccgcactcggtcattggttcatcctgtatcggggcatcggtggtcggcgggatctgcaacaactccggcggctcgctggtacagcgcggcccggcgtacaccgaaatgtcgctgtacgcgcaaattgatgaaaacggcaagctgacgctggtgaaccacctcggcattgacctcggcaccacgccggagcaaatcctcagccgcctcgacgacgaacgggttaaagatgaagatgtccgccacgacggtcgccacgcccacgatcatgattacgtcacccgcgtgcgcgacgtgaatgccgataccccggcgcgctacaacgccgacccggaccgcctgtttgaatcctcgggctgcgccggcaagctggcggtgttcgccgtgcgcctcgataccttcccggcggaaaaacgccagcaggtgttctacatcggtaccaaccgcccggacgtgctgaccgaaattcgccgccatattctcgccgagttcaaccatctgccggtggcgggcgagtatatgcaccgcgatatttacgacatcgccgagcagtacgggaaagacaccttcctgatgatcgacaagctcggcaccgataaaatgccgttcttctttaccatgaagggccgcaccgacgcgatgctggagaaagtgtcgctgtttaagccgcacttcaccgaccgctttatgcaaaagctgggtcacgtcttcccgtcgcatctgccggagcgaatgaaaacctggcgcgataaatacgaacaccatctgctgctgaaaatggcgggcgacggcatcgaagaggctcaggcctggctcggggaatatttccagaatgccgaaggggatttcttcgtctgcaccgcagaagaaggcagcaaagccttcctgcaccgctttgccgccgcgggtgcggcgatccgctaccaggcggttcacgccgatgaggtggaagatattctggcgctggacatcgccctgcgccgtaacgacaccgaatggtttgagcatcttcccgccgatatcgatagccagctggtgcataagctctattacggccactttatgtgccacgttttccatcaggattacatcgtgaaaaaaggcgtcgatgcccacgaactgaaagagaaaatgctggtgctgctgaaggagcggggcgcccaatatccggccgagcataacgtcggccatctgtatgaagcgccggaaagcttaaaacgcttctatcgcgaaaacgatcccaccaacagcatgaacccggggattggcaaaaccagtaagcaaaaatactggggagaagcgcaggataaaccgacgagcgcgaccgaaccgcaataatccgcacgggggactgttcagccgcggggcttctgtattacgctgcacgccggagaaatttcctctccggcaaacccgtttaaggaattaatccatcatgtccgcagtggataagctatacgacgctgacttagagatccgcgaagcgctgcccgatgacgcccacgctatcgccgcgctgtacgtctggcacgtgctcaatggacgcgcctcttttgaagagatcccgccaaccgtggatgagatgcgcaagcgaatcaaaaccgtgcgcgatagcgggctgccgtggctggttgccctgtggcgcggcaccatcgtcggctactgctacgccaccttttaccgcccgcgtccggcctaccgctacaccctggaagagtcgatttacgttgaggcgggaatggggggacgcggtatcggcagcgccctgctctcgcggttaattgagaaatgcgaacagggaccgtggcgacaaatgctggcgattatcggcgatggccacagtaacgccgggtcgattgcgattcataaaaagttcggttttagcgtggcgggtcagctgcgcagcgtcggctataagatgggcgactggcgggataccttgattatgcaacgcccgctcggcgatggcgactggacgctgccggagtaaccccccggctcgcgctgcgcttagccgggctacggtacagcgcggttcggtagcccggataaggcgtttacgccgtaatccggggaaatgggggttaatcgttctgcgcggtctgcgcgccgcctttcagcatcgcatcggccatctgcgcttcacgctgctttttatagctgagcgcggaagccggaaccggcatcacttttcccgtttcaatccacgttctcaggcggctggcatcggcgaagtgggtatatttgccaaacgcatccatcaccaccagcgccaccgggcgctgattaatcaccgtacgcataatcaggcagtggcccgccgcgttagtaaagccggttttggtcagctgaatattccagttatcgcggtagaccagatggttagtattgcggaacggcagcgtataggccggatgggcgaatgtcgccatatcttctttggtggtgctcagctggccaatcagcggatactgctcgctggcgatcagcagcttagtcagatcgcgggcggtagagacgttatgaatcgacagaccggtgggctcaacgtagcgggtgcgggtcatccccagcgcctgcgccttggcgttcatcgcgcggataaaggcgtcatagccgcccggataatggtgcgccaggctggcggcggcgcggttttccgacgacatcagcgccagcagcagcatattgcggcggctgatttggctgttcagacgcacccgtgaatagatccctttcatttcaggcgtctggctgatatcaacggtcagcatctcatccagcggcagatgggcatcaagcaccaccatcgcggtcatcaccttggtgatcgacgccatcgggcgaaccaggtccggctggctggcatagatgatttttttgctggcaaggtcgacgatcatcgcactgccggaagcgatatccggctgggaggcggtcaccgccgtggaggttttagccaacgcctggggcgcaaaaggcacagccagcagcaacgtcaggctgagcaaagaaactcgaaatttggtcatcgtgaacattctgaaaagtatttttgcacgttatgaacgtacgccgcggcgctggggtgatgacgccgctggcaaaaatcatcataccttgtcagaacgcgagctggctaataagaatcgtgaacaaatgctgcattgccgacataaaaatctatttatgccggcaatgagttaaatcagaagagcctatatccgtatccccagagaataacggtaatcgccaacagcacttccagcaccagcacccctatcgccagagtcgagctggcgaagctcaacccctcttctttgttgatccccaggaacgtgggaataccgagatacagcagatagccggtgtaaagcagcgcgacggtcccgaccagcgcgcacagccacaccagcggatagagcgccacgagcccgctgaggaaaagcggcgtggcgacatagccggcgaaaaccatacagcgcttaagggaaggccgctgcggatagcttcgtgccatccaccagataacccgccccatcaccgcaaccccggcgagcatcacggcgtaaaacagcaccgccagggccagcccggtcatcagcgacagttttaccaccgtgccgtcgccgaagttccagcccagctgcgtggtgccaataaaggcgcagataaccggaaccgccgccatgaccagcacatggtgcgtatagtgatgcgaaacggtttcgttttcgcttttaataacgctcatctcttgattaggatgagagaagagcccccagacatggttcatagcgtcccccttgtcacggcgtggtacagcactgatccaagtataattcaccttatagattattttgtgtacagcgagaaaaatgcgcttcccccgcatttttatcatcagggtgtatgattaagggactgacgttttatggagttaatctttatatggatatcaataacctgatttcccagtacggctacgcggcgctggtcattggcagcgtggcggaaggcgaaaccatcacgctgctcggcggcgtggcggcacatcagggattattgaagttctggctggtggttatctcggtcgccctgggggggatgattggcgatcagctgctttatttactcggcaggcgctttggcggacggattctgcggcgattcgcacgccagaaaaagcggatccaaaaggcccagcggatgatccagcgtcgcccctacctgtttgtcatcggcacccgctttatgtacggctttcgggttatcggcccgctgctgattggcgccagccgcctgccgccgaaggtgtttctgccgctgaatattgtcggcgcgattatctgggcgttaatttttaccacgctcggctatctcggcggggaagcgattggcccgtggctgcatcatctggatgcgcatctgaagcactggatctggctgattctggcggtggtgctggtggttgcggcgcactggtggctaaagcgccgcgaggcaaagaagaaagagtgacgagagttcccggatggcggcgtaaacgccttatccgggcgacaaccccacagatcgcatgggcctgtagcccggctaagcgcagcgcgagccggggaaacagaactacttcgccgcctgatgatacccgccgcccagcgcggaggtcagctggatgctggcatcaagccactggccgtgcaggcgcagcgcggtgacgcgctcctgcagcgccggcagcttcgccaggctgacgcgcgagccggaaataatcccggcgttcatccgcgcctgcgccagcgcgaccatccgctgagcatctttttcaacctgccgctgctgctgatttttcgccatcagcgtttccatctggctggcggttttcgccacctgattaaccgcatcgaccaccgctttgttgtacttcgctatcgacagggcattttgcgcgctggcgatatccagattcgcgttcaggcggccgctatcaaagatcggcagggtcagcccggcggtgacgcccatctgctgggcagagtggcggaacagatcgctgagatgcagggcatcctgctgcaggaaggccatcaggttgatatccggataaaacgcggctttcgcggcatcaacttcgcttaatgaagcctcgatataccagtgggcgacctgcaggtccgggcgtcgcgccagcagctcatagcccagctggttgggcatttgcgcgctgacggcgggtaaatccgccggatgaagattcagcgcctggctctggctgttggtcagcgccatcagccgcgcttcaatctccttcatattgcccgccacgtcggcgagctgctgatcggttttactgacgttaatatcgttctcggccccttcggccgagttggtgatcccgcgttgatacagcgcagtatccacggtaacgacattattctgttcgcgcttcacctgcgtcagcacgtttttaatggccgcttcggtctgccactgccagtaaaggcgggcgacgctgccggccagcagttcgcgggtctgggcttcttcggcgacctgggctttgacttcaccgatgcgcgctttaagtagcgcgcggtttttaccccacagatccagatcccatccggcggtcagtccgaaggtgccgttggtgtaccacggcccggtattgccgtcggtatcggtggcaaacggccccatcagcccctcggaggacattttctgccgttcaatatcggcggaaaaatccaggttcggccccaggctggattgcgacatccgcgcctgcgcttccgccagcctgatgcgctgttcggcaatctgcatgtccggcgcattggctaaggcacgctgaatcaggctattgagctgagggtcatggtaatcctgccaccagttgctctgcggccagccgtttttcacggcggcgggcagttccgttgcgacgtgggatgccggggtttgctgctggagcggcttgccagtatcgtgcgatggcgcgcagcccgccagcgcgataaccagtggcaggccagccaacgcgcgtatgctcaaagtcaggttcatgaaatcggtcagatgattaaataaggtcgggtatattaagctacttgcatcctagccgtttagtaaagcgtgtgccgtaactattagcagactaaaaataaacttctcatggagtgacaatgagtcagaacatctatgacgatcccgctttttttgccggatacgccaccctcgaccgttcagtcaaagggctggaaggcgcgcccgagtggccgacccttcagcaaatgcttccgccattatccggtttacgggtcgtcgatcttggctgcggctacggctggttttgccgctgggcccgcgatcggggcgccgcgcaggtggacgggctggatctctccagtcgaatgctggagcgcgcccgcgaaatgacggagggcgaaggtatccgctatcgctgcgaagatcttcagacgcttaccctgcccgccgatagctgcgagctggtctatagctcgctggcgctgcactatctgcccgacgtggcgccgctgttcgccaccgtttaccgggcgctaacgcccggcggtacgctgctgttctccgccgagcatcccatctataccgccccgccgcgtcagggctggcaggtggatgagaacgggcagaaaagttggccggtgagccactaccagcaggagggcgagcgcatcagcaactggtttgccgacggggtgaaaaagcagcaccgcaagctttccagctggataaaccagctgatcgccgccggttttatcatcgatcatctggatgagtggggaccgacggcggagcagattgccgctcagccggcgctggatgaagaaaaagagcggccgatgatttttctcctgcgcgcgcgcaagccggcgtaataggcaaaaaggcccggaagttatccgggccataaggctgatgttagcttcgtgctcagggcattactcttttaagctgccgccgttggtggcgattacctctttataccaccagaagctcttcttgcggctgcgcgccagggtgccgttgccttcatcgtcgcgatcgacgtagataaagccatagcgtttggacatctccgccttcgacgcgctcaccaggtcgataggcccccagctggtgtagcccatcagctcaacgccgtcctctattgcctcacgagcctgcaccagatggtcgttaaggtagctgatccggtaatcgtcgttgatgctgccgtcggcttccaccttatcctttgcgcccaggccgttttccacgataaacagcggcttctgatagcgatcccacagcacgttcagcagcgtgcgcaggccaagggggtcaatctgccagccccactccgagcttgccaggtgcgggttcggcaccatgctgagaatattgccgcgcgattttttgttcagctcttcgtcggcggtcacgcagccggtcatgtagtagctgaaggagataaaatcgacggtctctttcagggcttcgcgatcggcatcggcgatctcaaggctaatgccgttgtcgcggaaatagcgcagcatatagcccgggtaagcgccgcggcactggacatcgccaaagaactgccagctgcggttctgctgcagggtttcaaaaatatcgtccggtttgcagctcagcggatacatcaggccgccgagcagcatgttgccgattttgccctcaggcacgatgtcatggcaggccttagccgccagcgcgctcgccaccagctgatgatgaatggcctggtagacttcagctttgctgctgtcggccggcagaccgacgccggtcatcggcgcgtgcagggacatattgatttcattaaaggtcagccacagtttgaccttcgcctggtagcgcgcaaacaccgtacgggcgtagcgttcgaagaagccaatgactttgcgattgccccagccgccgtagtttttcaccagcgcccacggcatctcatagtgggacagggtcaccagcggagtaatattgtgcttcgccatttcatcaaacagcttatcgtaaaaggccagcccggcttcgtttggctgcgcctcatcgccctcagggaaaatacgcgcccaggcaatggatacgcgcaggcagttaaagcccatctcggcaaagaggctgatatcctccggataacgatggtaaaaatcgatagcaacatcttttataccgctatcgccaggcacgcgttctacgacgtcgccaaatacgccgcgcggctggacgtcagaagtggttaatcccttcccgtcttccagataagcgccttcaacctggtttgccgcggtcgcgccgccccataaaaacgcctgtgggaatgtcttcattcatctctctcctgtgattaacggcttacggacaacagcggctgaccggcatccaccgcgctggcggatacgatgtcgagagcacgaaaatcgtcgctgttgctgataataatgggcgtcgccagatcgtaaccggcgttcagaatcgcctgacggtcaaactccagcagcagatcgcccgctttgattttgtcgccctctttaacgtgggcggtgaacggtgcgccatcgagcttgacggtgtcgatgcccacgtggatgagcagctcgattccgctatcgctcagcagaccgatggcatgtttcgtctgaaaaatcgaggcgacctcgcccgagaacggcgcaataactttgcccactgaggggataatcgccacgccctggccaagtaaaccgctggcgaaggtgctatcgggaacctgatccaacgccagtacgctgccggtcatcggcgccaggatgtcgttttccgaggccggagccaccacaacggccgcctgttcagcggtgctgcgcggcagcccggcgactaacgtgagcgcgcaggcgataattaaagcggcaaccgtccccagcgcgccgccccacaccgtggcgtcaatgccctgcggcgggatcatctgcgccagggtgaaaatattaccgaaaccgaaagaatagacgtggctgtcgctaaagccgacaatcgcgccgccgatggcgccagcgacgcagccgaagataaacggacggcggagcggcagattcagcccataaatcgccggctcggtcacgccgaagatccccgcggataccgccgagcccgccagcactttttgccgcgcatcgcgggtgcgcaggaaaatccccagcgcggcgccaacctgccccatcaccgccggcagcagcatcggcatcatcgaatcatggccaagcacggcaaggttgttaatcattaacggtatcaggccccagtgcagcccaaagatgacgcacacctgccacagcgcccccatcgccgcgccggcaagccagggcgcaacctgatagataagctgatagccgttggccagctgctggctcagccaggtcgcaaccgggccgataatcagaaacgtgagcgggacgaccacggccaggcaaatcgccggggtaaagaagttcttcatcgacgagggcagtatcgcgttgctgcgccgctcaatccagcagctcacccacgaggcgaggataatcgggatgaccgatgaactgtaattgataaaggtcaccggaatcccaaggaaatactccgccgcggcgtcaggcgccatactggcttcaaaagattgaatcatcagcgggtgggttaacgcgccgccgatcaccatggtaataaaggcgttgccgccaaatttcttaccggcggtatagccgagaaacagcgggaaaaagaagaacagcgcatcgctggcggcaaaccagattttgtaggttgcctgctgcgtcgttaaccagccgcaaaccaccgccagcgccagcagccctttgaggatccccgaggccgccaggacgccgataaacggggtgaaaataccggaaaccacgtcgataagctggccgataatcgacactttttcgcctttcaccgccaccggctcgctgtcatccgtcagtccggcttcgctgcgcaccgccagccagacatcgtgcacgtggttaccgatgaccacctgaaactggccgccgctttccaccaccatgatgacgccaggattcgccttcagtccttcggcatccgccttcttgctatctttgagcttaaaacgcagccgcgttgcgcagtgaaccagactcacaatattctctttgccaccaacccggctgagaatatcctgcgcgagtgctttatattccatgctgtttttccttacttccgctgcccgcaggcatcgttaactgagtattaaaaataaaaaaaaacccgagaacaacgccgtgtaggcgttgcgctcaggttttgcctgcgtaatgcagtaacaatccagttgtagcgcgggagctatgcgccaggcccgatcggcgcttagcgtccctcttttctcacccgctcaatatgaatggcgagaaacataatttcttccgtcgtcagcggccgctggtagctcttttgcaggtgccgggcgacggtttccgcacacttccacgctttagggtagttatcctttaccgcgctgtgcagcgtcacatcatcatcttcgaccaccgttcgcgtcagcatgcgctgggcgaaaaacttgagatgggtgacaaagcgctggtagctcagcgactcttcatcgtagttcagcgtcagctgatacttcaccagctgcaggatctcctgcatgacccgggtgacgtgcattacttccggcatttcgctgttgagctgcgccgtgaccagatgcagggcgataaaacccgcttcatcttcggccagttcaaccccgagccgtttggcgataatcgcccgcgcttcctgccctaactcaaattccttcggatacagccgctttatttcccacagcagcacattacgaatagcgatgcccttcttctgccgctcaatcgcaaagtggcagtgatcggtcagggtaatgtacaaactatcctgtaacttaccgagacgaccgcgcgccagatcgatgatccgatcgcaggtcgtcatcacttctaatggtatctgactgagtaattcacctaaacggccaaccagttcatcgctctgcagcgcgaagaccttttcaattttactttcatcaagagagtcaccaacgcgtttctgaaaggcaagtcctcggcccatgaccacctgttcgcgctgctgctcatcaacaaccaccactacattattattaagtactttggcgatttgcatatgaaccccaaaaacaaaaaaacctgaccccgacggatgccaggaaatcaggttttgcctgccggagcagtaacaatcggtagtgagtatttcactgtccgccgggtaatctcaatgggacaagctaaaaaatgtgatgccggtcagatagtttagctacgccagtcgttaatcgtgcgcgctatgctggttgaatcctgtagggtgcgtaccgcgctgaacaggtcagccgcttcgaggtactctttacgcaaatagctcagccactgttttatccgcgcgacgtgataaaggccggtgtcgccctgcttttccagacgggtgtatttttgcagcagttcgaccacctgcggccagggcatacgcggttcgttatattttatcacccggctcaggtttggaacgttcagcgcgccgcggccaatcatcaccgcatcgcagccggtcgcggccaggcaatcctgggcgctttgccagtcccagatttcaccgttggccaccaccgggatagtcaggcgctgacggatttcgccaatagcctgccagtcaatgcgctccgctttatagccatcctctttggtgcggccgtgaaccaccagctcgctggcgcccgcctgctggaccgcatcggcaatttcaaaccgccgctcgccgctgtcccagccaagccgaacttttaccgtgaccggcagatggccgggaaccgcctcgcgcatcgctttggcgccgcgatagataagctcgggatctttgagcagcgtcgccccgccgccgctgccgttcaccagctttgacgggcagccgcagttaaggtcaacgccccaggaaccgagctcgaccgcgcgagcggcgttttccgccagccactgcggatactgcccgagcagctgtacgcgcacgcgggtgccggacggcgtcaggctgttgttatgcagttccggacacagtctgtagaacgattttaccggcaggagctgatccaccacgcgcaaaaattcggtgatgcagagatcgtaatcattcacttcggtcagcagctcgcgcaccagcgaatcgagcacgccttccatcggcgccagtaatacacgcatattgttttttcattgcccggaaaaaagaggcgctatgttagcgcctctggatgcgggttgaaaggggccaagatcggttttcccggcagcggcgctgctgcttcccggcttgcgctgcgcttagccgggctacaaggtcacctctgtctgcgccccgggaaatgcacagccgcttaacgtggttccaggcagttatcctctttccagccgtacagccactcgatgccgcgataaaactcgctctgggtcttgcctttccacagcaggttgcgtacctggcgctcaacgccggcggcgtgatagacccgccccatttcacgcgtcgaccagacgatccgcgcggtacgcggaatacgtaccgactcatacagcgcgaaagcgcgggcggcgtcgccgtcgcactgcgccagggctttacccagcgtcaccgcgtcttccagcgccatacaggccccctgggccatatactgcgccaccgggtgagcggcatcgccaaccagcgtgatgcggtcgttgccccatttctctaccggctcgcggtcggcggtggaccagcgccgccaggaggtcggcttatccagcatctgccggggacgcgggtgaatgcctttaaagtaggagagcacctcttctttactgccgtcgcgcacgccccactcttctttctcccggctgtggaaggtcaccaccagattgtactgcttgccgccgcgcagcggataatgcaccaggtggcagtgcggacccgcccacagcaccggcgcgttaatgcgcaaatcgtccggcatatcggcggcgtcgaccaccgcgcgatagactacatggccggttacccgcggcgtatcgcccagcaggctctgacgcaccaccgacttcacgccgtcgcagccgatcaggatatccgccgtccagctgttgcctttgtcatcgaaaaccgtcacgtcgtcggcggtctggcggatatccgccacctgggtcgaggtgcggtactccacgcccggatgactctgcgccgcctcccagacggtggcgtggatgtctacccggtggatcaccgcatacggcccgccaaaatggtcgcggaacgcctgtccggtctcaatatgcaccacctcttcgccgcttaccgcatccatcatggtgatatggtcggtaaataccgcccgctgccgggcgactgcgccgacgccgaggctgtccagcgccgagaacgcgttagggccaagctggatccccgcgccgatttcgccgatttcatgcgccttttccagcagcatcaccttgatgccctggcgcgccagagagagcgccgtggccgctccgccaataccaccgccgacaataattgctcgcatcacttttgccatgttgcctcctaagccgggatcttatcttgttggttttccggcgcggcggcgataaacgccggtagccgggtgcagacgtcatagaccgcctggcagcgcggatagtggctgagatcgcagcccattctcagcgcgttggcccactgcggaaccagacagcagtctgccagcgtgggcgcatcgcccacgcaaaaatcgccggatttcgcgtggcgcaatagctgctcgacggcgctgaatccctgctggatccagtgcgcataccagcgctttttctcctcttcgctcaccttcagttcgtcgctgaggtagcgtaaaacgcgcatgttgtttattgggtgaatatcgcaggcgatggcgtaaacaatctccaggacccgcatccgcgcgctgtcctcctggggcagcagcagcggctgcggatagtgccgatccagccagtcggcaatcgccagcgactggccgagagattcaccatcatcagtaatcaacgttggcaccaggccaaccggattcagccgccggtactccagcgcgttctgctgaccgatgcggatattgacgcccacgctctggtagtcgatgcctttcagcgccagcgcgatgcgcacgcggtaggaggctgagctattgaaaaaactgtacagcttcatcattcacctcacaccacgcgcacggcgattggcgtcagtccatctacgttgccggtgatgacatcgcctttcaccaccgcgccgacgccttccggcgtgccggtgaaaatcagatcgccgggctgcagctcaaagaagccggaaagatagctgatggtttcattgaccgaccagatcaggtgacgaatatcgctgcgctgatgatcttccccgtttacctgcagccaaattccggcctggttcacgtccgccgtatccgctttatgcagcggcgcaatcggcgcggacaggtcaaaagctttaccaatctcccacggacggcccatctggcgcatctccatctggcgatcgcggcgggtcatatccagccccgtggcatagccccagatatactcatgggcctgctccagcgggatatcgcttccccgcttgccaatcgccaccaccagttcaatttcgtagtgatagttatcggtttgcgtcggatacggtaactccagcgtctctcccgcagcgacgggcaccaccgcatcggctggcttacagaagaaaaacggcggttcgcgatccgggtcaaagcccatttcacgcgcgtgagcggcgtagttgcggcccacgcagtaaacgcggcgcaccgggaactgctcatcgctgccgacaaccggaacgctaatcggggcctggggtgcaaaaacgtattgagtcatgatggattccttattcttcatttttaataacgcgcttcgcggaacaggccgagcgcttcctgcacgggacggtccgaaaagctgaataacacggtatcttcggcagagttaaaagagacggcatgccaggtcggcaccacgaagatatcttttgcctggaaggcgaaggtctgttcgccaatggtgacctggccgctgccttccaccacgtgatagatagtgctgtcggtggttttcgccgcgcgtgaggtaaaccctttcggtaacagctgcaggaaggcgcccatcgacggcatcggatagccgccggtaaccgggttgacgtagcgcattttatagccgtcccactcgtcggcatcgcccatacgcgtcaggtcgtgcagcgcttcgcggctgcggtcgtagcgatagttaaagatgggcgaagagttaccgacctgatggcgcagcggcagcatattggcggcgtagcgcggcaggtagtctccctctttgcgggtcaccggctgctgatcttccgggtaatcctcagcgaagccgcagcccagatagttcaccagcggcaggtcgaggccgtcgagccagaccaccggctcattgccgggattgccgtgatcgtgccagcgccactgcggcgtcagaataaagtcgccggcgcgcatggcggtgcgttcgccatcgacggcggtaaatgccccttcaccttcaaccacaaagcgcagcgccgactggttatgacggtggctcggcgccacttcgccgggcatgatcagctgtaaaccggcgtacagcgaggaggtaatcgatgactgtccgcgcagcgccgggttctccagcaccagcacgcggcgtatcgcctctttcgcgccaatcagctcgccgcttttcatcagcagcggacgaatctcctgataattccagtaggccggggcgcaggtggcattcggcgttttcggcaccaggtggtgcagggattcccaaagcggcgtcagattttggccggaaatatgctgatagtactgctgacggtctttattgatttccattgaagattgagtcatgagcgttctccttatttattcacgatgccagcagaaggcaacgcggcaggtacagatgttgggttgcggacggcaagcgtcagcaggacaagcatcacggcgctaacgacggccggtactgcgataacaaaaaacagggtgtcaaaagagaaattcatcgccatcatcacgccgccggagagcgagccgacgatggcgccgcagcggccgaccgcgtttgaccagctcaccccggtcgcgcggctttgggtgggatacagcgtagcggttagcgcattcagccctacctgcgagccgctgatgccaatcccggtgccgaaaatcgccagcgccatcagccacaggccgttctcgctcaggccaatcatgacgatacaaaccgcccccaggccgtagctcagcgccagcacccgatagggattgaagcgatccatcagcacgccgagcagcagcgcgccaaaggtgccgccaatctggaaggcggcggtgacccacgaagcgtgctgtaaatcaatcccccggtggttaagcagcgtcggcatccagctggagagcagatagataatcagcaggctcataaagaacaccacccatagcattaaggtgatggccagctggcgaccggtgaacagctggctgatgctgcccttcgcccctgcggcaggctcatcaagccagaaatgggtatcggtatagcgttcgccggttatggcactaacgtttttggcaatcaccgcctgcgggagctggcgacggatctgccagcgcggagattcgggaagcagcggtatcagcgccaccgccagcagcagcggcaaaacgccgcccagcaccagaataccgtgccagccaatcagcgggaccagctgcgcgctgaccacgccgccgaaggccgagccgagggtgaatccacaaaacatcagggtcaccagcgccccgcgccgccgggcgggcagatattccgaggtcatggtaatggtattaggcatcgcgccgccgaggccgagaccggtcagaaaacgcaggaacaccagcatctgtagatcgggggcaaacgcggaaagcaggctgaacaggccgaacagcgcgacgcagaactcaatcacccgtttgcggccaaagcggtcggagagcggaccgcagagcagcgccccggcggtcaggcccagcagccctgcgccaaatagcggcgcgaggtcaccggcggttaattgccagtggctgcggatatccggcgcaataaaaccaatcgcggcggtatcgaagccatcaagcatcaccaccaggaaacagcagataatcacgcgccactgccgggcgccgaccggcacagcgttgagtagtttttgtagttcaagtcgttgagtcatgattatgcctcagagcaggtaggggtagatgttgtatttatttcttttatgttgcgagtttgtaactgtggcaatgaaatgtacaatggtatttcgggcatagacataacctggaggttatcgctgatggcagactggacgcagaaactgaagctgcaccatttacagatgctggtggcgctgggggagcaaggcaatctcacgcaggtggcgaaaatgatgaacattactcagcccgcgctctccaaatggctcagccagtttgaagacgaagtcggcatggttttgttcgaacgccacagcaaaggtctgcgcccgaccgaaggcggaaagctgctgcttcagcacgcccagcggctgattaacgatatgtcgcgttcgcagtatgaaatcgagcgttttaaacagggaggacaggtgggcagcctgatgatcggctgttcgccggtggcgaccgactgcgtctcacaggcgatcctcgaactgctgaaagagatgccgaccctgcacctgaatattgaagagaaagtgatgacgccgctgcttaacgacctgctcgccggggtggtggatgtcgtcgtcgggcgcgtcggcgggcgggcgctggagctgccgctgagctaccgggtgctctacaccgaaccggtctgctttgtcgcccgccccgatcacccgctggcccagaaatcgcgattaagctgggccgacctctctccttggcgctggatcgtctggcccaccggcacgccaattcgcctgagcatcgacaacgcgctggtggataacggcgtgatgctgccggaaaacaccattgagtccgcctcgatgaacgtcaccagcaatctgctgcagagcagcgatatggtctcgattctctcactgcgcctggcacagcgctacgcggcccagcaccagctggcgattcttaatttgccgcgcattgaacaaaaaggtagcgttggggtgttctggcgaaaaagtgaagcgccgtcgctggcgctgagccgatttctccattgcctgtccctgcaatcttcactctgaccgccgtccggtccggtgttcacggtctctatcgcaggtatgcgcagaattcatgatgtgatcggtagcacatttttggctttaattgtatgatgaatgcggttcatcaagggttattaccatgagtaaatcactgattattatctggcagtatctgcgcgctttcgtgctcatctacgcctgcctgtatgcgggcatttttctctcttcgctcctgccgatcgcgattcccggcagcattattggcatgttgattctgttttttctgctggcgctgcaaatcttgcctgcacagtgggtcaaccccggctgcaacatcctgattcgctatatggcgctgctgtttgtacctattggcgtcggcgtcatgcagtactgggatttactgcgcgcgcagtttggcccggtggtggtctcctgcgcgataagcacgctggtggtctttttagtggtcagctggagttcacacctggttcacggtgagcgcaaagtggttgggcaaaaaggaagtgaaaaatgatccatgaaatctggtggtcgctgccgttaaccctggccgtctttttccttgcccgcaggctggcggcgcggtttaaatttccgcttctcaacccgctgctggtcgcgatggtggtgctgataccttttctgctgattaccggcatctcctacgagcgctatttcctcggcagcaaaattcttaacgacctgctgcagccggcggtggtggcgttggcctttcctttgtatgagcagctgcaccaaatccgcgcccgctggaagtcaatcatcaccatctgctttatcggcagcgtggtggcgatggtcaccggcactaccgttgccctgatgatgggcgcaaccccgcagattgccgcctctattttgccgaaatcggtaacgacgccgattgccatggcggtgagcagcagcattggcgggatcccggcgatcagcgcggtctgcgttattttcgtcggcattctcggcgcggtctttggccacaccctgctgaatgtgatgcgcatccgcaccaaggcctcgcgcgggctgtcgatgggtaccgcatcccacgccctggggaccgcccgctgcgctgagctcgactatcaggaaggggcgttcagctcgctggcgctggtgctttgcgggattattacctcgctggtcgcgccgtttttgtttccgctcattttagcggtggtgggttaaatgtgattttaatcacatttttaaatgcaacacagattagttgcaatgacaatgagatgtttatcacatatacaggttgtaaccacccgtacactagatttccattacattgttatgaggcaacgccatgcacccacgttttcaagctgttcttccccaactggcggcggacctgcaagcggccatcgccccgatgctggccgacccgcatttcccggccctgctgaatgcagaccaggtggcagcgctgcaaagcgcgacggggctggatgaagacgcgctggcctttgctttgctgccgctggcggcggcctgcgcgcgggccgatctgtcgcattttaacgtcggcgcgattgcccgcggcatcagcggcacctggtacttcggcggcaatatggaatttctcggcgccaccatgcagcaaaccgtgcacgccgaacaaagcgccatcagccacgcctggctgcgcggcgaaaaatccctgcgggcgattaccgtgaactacaccccctgcggccactgtcgtcagtttatgaacgaactgaacagcggcctgtcgctgcgcatccacctccccgggcgcgaagcgcattcgctgcagcactatttgccggacgctttcggcccgaaagatctggacataaaaaccctgctgatggatgagcaggaccacggcttcccgctcagcggcgacgcgctggctcaggcggcgattcaggcggccaaccgttgccatatgccttacagcaactcaccatccggcgttgcgctggagctgaaagacggtacccttttcaccggtagctatgccgaaaacgccgcctttaacccgacgctgcccccgctgcagggtgcgctgaatctgctgagcctcaacggatacgattacccggatatccagcgcgcgatcctggccgagaaggccgatgcggcgcttatccagtgggacgccaccgtggcgacgctgaaggcgctgggctgccataatatcgatcgcgtactgttaggttagtcacattctgcgggccaaacggcccgcgctgttgaaaatccccgcaattaaacgacggtttcttgcgcttgcccgacgggtaaagtagcctgaagcttccttcgtccactattgagccaggttcatgttaaagcgtgtgttatacagcctgttagtcctgttcggcttgctgctgttaaccgtgttgggactcgaccgctggatgagctggaaaacctctccctatatttacgatgagctacaggacctgccctaccgccaggtcggcgtcgtgctcggtaccgccaagtactaccgtaccggggttatcaaccaatattatcgttaccggattcagggcgcgctgaacgcctacaacagcggcaaggtgaactacctgctgctcagcggcgataacgcactgcaaagctataacgagccgatgaccatgcgccgcgatttaattaaagccggcgtcgatccggcggatattgtgctggactatgcgggtttccgtacgctcgattcgattgtccgcacccgtaaagtcttcgatactaacgactttattattattacccaacgcttccactgcgagcgcgcgctgtttattgccctgcatatggggattcaggcgcagtgctacgcggtgccgtcgccgaaggacatgtggagcgttcgcctgcgcgagttcggcgcccgcttcggcgcgctggcggatctctatatttttaaacgcgaaccgcgctttttaggcccgctgatcccgattcccgcgctgcaggaagttcccgacggcgcgcagtcctatccggcggtcacgccgcagcagctgctggagctgcagaaaaaagagaagtaaagcctccataaagtgagcgtgataactggcgtcttatcgagcgggaatacttttctgattacgcgagtgagtatcgggatactgaggatagataccctgaataattcgagtggcaggaaggcggcaaattatcatccagaaaatgcaaaaggcagacgcctgaactgacgcctgccttcattcactactcgttacttcttccgcgcatacttaagcgaatccagcgccacggcgaagatgataatcgcccctttgatgatgtactgccagtacgggttcacgccgatataggtcagaccgtagttgatgacggtgaagattatcaccccggtcaccacgccaaatacggtaccgacgccgccgctgaacgatacgccgccgaccacgcaggcggcaatcgcatccagttcatacataaagccaaggttgttggtcgccgaaccgatacgtccggcttccagcagcccgccgaacgcgtagaacacgccggagagcgcataaatcatcagcaggttcagggcgacgttgacgccggagaccttcgccgcttccgggttaccgccgatagcaaaaatgtttttaccaaagcgggtcttgttccacaggatccatacgaagaatacggcaatcagcgcatagaaggtgatatacgacaggcggaatgagcccagcgccacaaacccctgggcaaactgcgagaagtggctatcgaagccggaaatcggcgacgcgccaacaaagtcgtaatacagggagttgataccgtaaacgatgatcatcgtgccgagggtggtgataaacggcgtcacgttcaggtaagcgatgataataccgttgataagaccaatgaccgcgccgatcgcacacaccagcaggataaccagcgggatcggcatcgtggccatctccgggaacaccttattggcattgtccaccgcctgcagcatcgtggcggcgataaccgccgccaggccgacctggcgtccggctgaaaggtcggttccctgggtgacaataagtccggccacgccgagagcgataataatacgcaccgaagactgggtcagaatattacttaagttcagcaaacttaagaaagtcggatcctggaaaataataatggccagcaatactaaaagaaccacgtaaatcccaccttctttcaaataggtgagaaaactctttttatttaacgcactcatgaggagcccctgatcttaaaggtgcaacgacgcaagacggagaatttcgttttgcgtggtggttttagtctcaacaattccggcaacaagaccattgctcattaccagaatacggtcagtaatacccagcagctccggcatctcggaggaaataataatgattcctttgtctttttttgccagctcggcgatcagctggtaaatttcgaacttcgccccaacgtcaatgccgcgcgtgggttcatcgagcatcagaatttccggctgggtcaataaccagcgaccgataatcactttttgttggttaccaccggacagcgaaccaatttgcgtgtgctgccccggggttttcacgcgcatcgaatcaatcacccattgggtatcgcttttcatgcgtgaattatccagcaatccgaccttattcttgtatttcttaatattggagatcagcgagttaaaaccgatatccaggtaggcataaattcccgtcgaacggcgctcttcggtcaccagcgcaaagccatggttgatggcttcattggcattatggttattaatcttcttaccgtgcagcttgatcgtcccgccggccttctcgcgaataccaaataacgtctccacgatatcggtacgtttcgcgccaaccagtccggcaatccccaggatttcgcctttgtgcagatcgaaagagacatcgcgaatcgatggctggcgcagtgaggttaaattgcgcacctcaagaattacctcacccggcttattctccttgttcgggaagcgctgattgagggagcggcccaccatcatcgcgatgatcttatccatatccagcccttccagcggctgggtggcaatccactggccgtcgcgcaggatggtaatttcatcgcacagctggaagatctcttccattttgtgggaaatatagactatgccgcagccgcgctctttcagcttgcggataattttaaacagatggttgacctctttttcggttaacgaagaagtcggctcatccataatcacaattttggcgttataggaaaatgccttcgcaatttcaatcatctgcatttgcgataccgatagcgttccgacgcgagcgcgcgggtcgatatcaatatccagctcatcgaaaatcgctttggtatcacgatacattttgtcctgatcgacaaacatgcctttggtgggataacgccccagccacatgttgtccattaccgaacgttgcaataccaggtttaattcctgatgaaccattgaaataccgttttccagggcttcttttgccgaatggaaatcgatctcttgtccctgaaaaagaatactgccggaatctttttgatagattccaaataggcattttaataatgtagatttgcccgcgccgttctcccccattaacgcgtgaatagagtggggacgaaccttgaggttcacattatcgagagccttgacgccaggaaacgatttgttgatgttgctcatttccaacaaatattcgcctgaccgttcgctattattgctgaccatagttatacctggctgcgtgcgtgcataccccagccgacgcattaacgacgagccgggacgagttctgtatcaggaataatcgggcgtacaagcgcgtacgcccgcagcttattaagcgattacttaccgataaattcgctcagattatctttatcaacgccaacgtacggtacgcggacaatcttattatcaattttccattgagtaccggcagccggttctttaccatcggccaggtttttcgccagatcgaaggtggctttcgcctgattgttggcatcgttcagtacggtacccgccatggcgccggatttcaccagcgccagcgcttcaggcagcgcatcgacgccgaataccggaatgctgctcttattgtgcgctttcagcgcttctaccgcgcccatggccatcgcatcgttgttagcgatgacgacttcaattttgttggcattcgggccagacagccaggcatccatcttatctttcgcctgagcggtatcccacatggcggtatctaacgccagttgctgagttttgaagcctttatcgttcagctctttaataacgtaggtggtacgcgcttccgcatccggatggcccggctcgcccttcagcaggacaaactgaatctggccgtctttattcagatcccagttcgggttcgctttccagtgcttggcaatcaggtcaccctgaatcacgccggactcttttgagtcggtaccgacgtagtacgctttatcgtagctatccagcgccttgcgggaaggttctttgttaaagaacaccaccggcacgttctggccacgcgctttatcgatgaccgtccccgccgccgccgggtcaaccaggttaatcgccagcgccttcaccccttttgccagcaggacgtcaatctgatcgttctgcttggactggtcattttgcgagtcattcatcagcagctgaacatccggcgctgatttgccatctttttcaatcgccttacgcaccaccgacataaagttgtcgtcgtatttataaatggtcacgccgatacgggtatctgctgcgtgagccgcggcgccaaataacatgctagccattacagcagacagggttaacaccttcttattcatggaatctccggttttattatgcagggtctttggtgtgaaaatggctggcgagcgttacatttatgttactgcacagcgacattcacgactgtaattctgtcttccgtgtagggtaacgctcctgaaaaacggctttattaatcgtttaaccgccgattactgctgtaaaagtgattaatcaccgtgacatagtatgttcagacttgtaaacgcagcaatcatagtcagcttaatgttaacaaactgtgaaatcactcacatattgaaagcggttacatcaggcagataattagttagtgatcggccccacaatttgcctctgcgccaccgaatgtcggcgcaccagcgtcggcataaagcagtggctggcatcacgatccagctttcccgccgcgccctgtagcgccagctctgtcgccagtttcgccatcgacataatcggataacgaaccgtcgtcagctgcgggtcggtgtaacgggaaatggggatatcatcaaaaccgatcagcgaaagatgctgcggtacggcaatgccgttatctttaagcgtcgtgagcgcgccggccgccatactgtcgttgtaggcgaaaaccgcgctcagaccaaggttgcgccccagcagttcgaccatcgccgcctcaccgccctgcatatccggcgacccggatcccacccagctttcgggagcgacaatgccgtgttcatgtaacgcccttaaccacccttctcgccgtaaatcatcatcttcaatgccgtgattggaagagaggtagccgatgcgctggtgaccatgattgagcagcatgcgggtcgccatcagcgcgccgctgacgttatccagcccaacgcagcggtgggcgtatcccggcacgatgcggttaatcagcaccattcccggcatatgctccataaaatcccccagctccgcgtcgctcagcgctttagagtggacgatcagcgctgaacagcgctggcgaatcagcacctcaatggcgttacgctctttttccgcttcatgatagctgttgccgataagcacatatttctgatgctgctgggcgacggtatcaaccgctttgaccagcgcgccaaaaaaggcgtccgacacgtccatcacgaccacgccgatggtatcgctgacctgcgtcgccagcgcctgcgcgttggcgttcggccgatagcccaacagcgttaccgccttcattaccgcttctcgcgtatccgggctcaccagcgcgctgttattcagcacgcgcgaaaccgtcgcgacggaaacacccgcctggcgggcgacatcacgaatggtgatcatactcaccgacctgtagagcattgcagtacgtcacactcacctcctgtgttcagcaaggaggctattctggcagcgacgtgccgtacgctacgtgagtgaagtcacagggatggaaacggttacatccattttgttaatgattgtgatccagatcgttatctggatgtatcttttaatgatgtccccgacgcacgcagggtgaattgacgccatagccactcaacgggcccctggcggaaatgacgtagccaaaaccacgagaagagaatattaaccgcccatacggccggtacgaaggctaacagctgtaagcggtcatacttcataaacaggccgaagcggtagaacagggtagtgcaaatcagggtctgcagcagatagttggttagcgccatgcgcccgacgcaggcaatcgcccccaccagacgactctgacacagctgcggccagaagccccaggccagcgccgcgtagccgatggtttgcagcggcgcgcccagctcccgcggcgcctgtagcaaaaatgcgcaccagcggtagtcccagccaagatgccactgggcaataatcgagggcaagttgaccgccattccggccgcaatcagcagcccgccggtacgccgatagtggcgaaggctgaactgccctttgagccagccgctgcgcatcagcgcggcgcccatcagcatcataccggccagctgccagccgtactgcgcgcccagcgccagcaggttatccgacagcatatccgcacgattgctcaccgcttcaaagccgccttttagcttccagtactgctcgtactgcaaatttgccgcgtccggcagccacgaacgattgggcgtattgccggaaatcaatcccagcaatagcagtaccgccacgccgataacgtacagcaccacgccggtattaaacagcgatttgacatcgtgcgcgtcgcgcaccatccgccagcccaccagcccgaccagcgcataggccagcagaatatcgccgtcccagaaaaacagtccgtgaataaagccaagcagcgccagcagcgtcaggcgcgactggatccagcgcttgccgcgcggcagcagaagctgaagtccggcgccaaacagcagggcgaagagggtcaggaatttgacctgcgccagcagatcgagaatcgcccaagtccaggcgtcgctggcggaaatgttcccggaccacgccgggttgaggtaagcggccttcggtaaaccgaaggcgctgatattcagtagcaggataccgaggatggcgacgccgcggacaaagtccagcgtgacatttctctccatgtaccctgctccgttttagttgtggtgacgtacggcgcgcaggaactcctggcgggtattctggctggatttaaacaggccgcccagcgacgtggtggtggtggcgctggtcgcatcgcgaatgccgcgcgctttcacgcagtagtgcaccgcatcgatggaaaccgcgacgttgctggtccccagcagcgtttgcagcgcggtgaggatctgctgcgtcagccgctcctgcacctgcggacgctgggagaagaactgcacgatacggttaattttcgacaggccaatcaccgaatctttcgggatataggccaccgtggctttgccgtcaatggtcacaaaatggtgttcacaggtgctggtcagggtgatatcgcgcacggtcaccatttcatcaacctgcatcttattttcgatgacggtgattttggggaaccgggcgtagtccagtccggagaagatctcatcgacgtacattttggcgatgcgatgcggggtctccatcaggctgtcatcacttagatcaaggtttaacagctgcataatctcggtcatgtgtccggcgatcagacgcttgcgagtttcattatcaatttcttgtactggcggacgcagcggcgtctccagcccacgagcgaccagcgcttcatgaacgagtatggcttctttactcagtgatgacatttttgttctcctgcaggtgtggcgctctttgctcttctgagggcaaagtttgtattcattgtgcgtgaggtgacgcacagaatccagtagccgcatcgataattgttgaaattggcgtcacctctcgttccacgccgccagaccagcgcactacgatgcgtcacgcaacgccctgctcaccttgccgcaaccaagccaatcgccgacccatagcgcgacgcctgccgctgcggcaaggtcagcatgttggttaaaagttgcattaatgatgcaatacgttccgaaaaggaggaagtgaaagttactcacgagggcatgaaatatctgtattatggaaaattacgcctgagacacttaaggagccctgcatggaactgctcgaagagcaccgctgttttgaaggtcggcagcaacgctggcggcacgactccgcaacgctgaactgcgcaatgaccttcagcatctttttacctcccgccgccgctgacgcgccgccgccggttctctactggctctccggcctgacctgcaacgatgaaaacttcaccaccaaagcgggcgctcagcgcgtcgccgccgaactgggcattgcgctggtgatgccggacaccagtccgcgcggtgataacgttgccgacaatagcgcttacgatctggggaaaggcgctggtttttatctcaatgccacccaggcgccgtggtccgcgcatttccgcatgtacgattaccttcgcgacgagctgccgcagctgattgcccgcgagtttaatctcagcggccgctgcgccatcagcgggcattccatgggcggccacggcgcgctggtgatggcgctgaagaatccgggccgcttcgtcagcgtttccgcgttcgcgcctatcgttaacccgacccaggttccctggggcaaaaaagcgtttaccgcctatctgggagcggataaagcggcctggcaggcctgggacagctgcgcgttaatgcaggccagcagcgagtcagatgcgattccaaccctgattgaccagggtgacagcgatacattcctcgccgaacagctgcagccggcggtgctggcggaaaccgcgcgtcagaaaagctggccgttaaccctgcgtattcagcccggttacgatcacagctactactttatcgcctcatttattgaggaccacctgcgtttccatgcccgacacctcttctcctgatccttcaatgcgtcgtgaatcaccttcccggcgcattgatgcttttccatctggcttcaccctgagcgcctttagcgagggctggcagggaaatccgccagccctcttttatcgcccggttagaagcggtaatcgacggccataaagtagcggcggccttcttccgtatagctatagtcgtcgcggctcagatccttatcgcccacgttgagtaccccggagcgcagcttgacgtttttggtgacgttccaggccgcgccgatatcaaacatggtgtagccgccgggcgttttgcccgtcgcgctgaccgaacgctgttcgccggtatagttggcggtgacgtagaaggaccagtcgtccagcggtttccagtcgagggtaccgttagcggtatggaacggcagcgtttgcagcggtttatcgccgccgttactcaggtcgcggccatcgttgtaggtgtagttgaccgtcagcttccattcgtcgccgaacggcaccttcaattccgtttctacccctttgatacgcgccttattgacgttgaagtagcggaataccggcacacgcttaccgttcacggttttccagccgacaaaattcgggtagcccggcgcttcgctggcgctggaagtacgcaggatatcgatcatatcgtcaacgttattctggaaggtggtgacgcttccttccacgccttcaagccagccttcttcaccgcgatagtaaagacccagttcgaagctttcgctggtttccggtttcagatccgggttaccgataatgctgcacgagccgcggcaggagttggtggtccagtccgggttcagctgcagcagggatggcgctttaaatgctgtcgcccagccgcccttcacggtcacggtatcggtggcgttatacaccagataagctcgcgggctccagtgatcgccataggtctggtgatcgtccatacgaatgccggtcgttaaggccagaggctcgattatccgccattcatcttcgaggaacagcgcgtactggctggcggaagtggatttaccgccgctgctcaggttgaccggatctttcagcttatcgtgacgccattcgccgccgaaggtcagcagctggttgatcatgcccagcggcagaacgtatttgccgtccaccgagttactctcagatgtgatcgtgccggcctggcccggatttttattatccactttctcgccgtagaatttcagctcgctattgccgacatcccagcggccgttgtggctcagggagtagttctggcgctcaaggcggttgcggtcaagagagtcggaatcccgatcctggcgatcgaacccgtagccagcggtgatgtcctgattatcagtgggcgtccaggcgaattcgacgttgccgtcgcggctggtgaagccttcaatacgcggcgtttcgccagctgcgttgctggaagcctgctgatcgtccttggcacgctttgccaggctgccgtaggctttcatccccagcacgccgtcaatcagcgggccgctggtaaagaactgaccgttgtacgtatcgccgcgatcgcggtgttcctgaatggtggtatccgcgctgagggtgcccgtccactgctgaccgacttttttggtgatgatattgaccacgccgccgagggcgtcggaaccatagagggaagacatcggcccgcgcaccacttcgatacgctcaatggcatcaaccgggatccagttgaggtcaaaatcgttgtggcggaaaacggcgttgcgcgagttaacgcgtttgccgtcaacgaggatcagcgtatagccgctgctgaggccgcgaatgctcacccctttgcggttatccccttcgttggtgagctgcacgcccggcacttcccgcagtacatccttcaggttttgtaccggtctacgctgcagatcctgttgggtgataacgctaatactggcgggcgcatctttgacgctctgttcagttgccgcagcggtgacgaccagcgtttcttcgttaacgtcggcgagcgccggaaacgccagggatacgacggacgcgcataatccggcccggacaaaagggtttagcctgaacattccatatctccatgaggtgtacaacaaaacaaacaaaaaaggtcctgctcacaggtactgtcggcatagcgctctaacggcgtatgcgcgcaattttttacagtagatgtggctggtcgccccttgtcagtctgaccctctgcaagatacggggattggcttcatcctgaatttggcggaaatgataaagataatgattacaattatcaataaaattatgaataactgtatcaacatgtaagaatcgcagacataaaaaaaaccctctcgatgaaagggttttatcttacggcgtcagctgaccttagcttttaaaacgctccgggaacttcatttcgctgtagcgcacaaaacgcgttcctttcgccagcttgtaaccgaaccagatcaccaggaacagcggaatgccgatataggttgccgccacgccgccccagtcgatggtatctttgaggaacgcttcgtaattctggcccagggtaatgatcaggcacagcacgaaagcgaagatcggccccagcgggaaaaagccggaacgatacggcagatcgttgagatcgttcccctgcagcacgtagccacgacggaagcgatagtggctaatagcaatccccagccaggcgataaagccggtcatgccggaggtattcagcagccacaggtaaacggtctgattaccgaacatcgagctcaggaagcacagccctgcaatcaccgtggtggcatacagcgcattacgcggcacgccgcctttagacagtttagagaaaatacgcggcgctttgccatcgcaggccagggtgtagagcatgcgggtggacgcgtacatcccggagttacccgccgacagtaccgccgtcagaataaccgcgttcataatcgccgccgccgacagcagccccgcgtgctggaagaccagcgtgaacgggctgacggaaatatctttcacgtcgttacgcagcaggctcgggtcggtatacggaataatcaggctgatgatcaggatggcgaacacatagaacagcaggatacgccagaacacctgccgcacggcgcgcggaatgttcttctccggattttccgactcgccggccgcgatgccgataagctcggttccctggaacgagaagccgacaatcatcgccacgccaatcatcgccgcaaagccgccggcaaacggcgcatcgtcgacaacccagttgctccagcccgccggctgtgcgcctttaaagatgccaaagatcatcatcacgccgacaataataaagatgatgacggtggccactttgatcagcgagaaccagtattccgcttcaccaaagccttttaccgagatccagttcagcaggaacatgatgccgaggaacagcgcgctccagacccagccgggtgcatcggggaaccagtaggtcatcaccagctgagcggcaacgaggtcaacggcgatggtcaccgcccagttgtaccagtagttccagcccagcgcgaagccaaagccttcctcaacgtaattctgcccgtaggtggcaaaagagccggacaccggcataaacgccgccagctcgccgaggctggtcatcaggaaataaaccatcaggccgatgagaatataagagagcagcgccccacccgggcccgcctgagaaatcgttgcgccagaggcaacaaaaagacctgtacctatggaaccgccaatcgcgatcatggtcaagtggcgcgccttcagttcacgacgtaaaccgggcgcttctgtggttttagtatccgaaaccatgtgaaaatgctatccatccaaaaaacgaggcgagattgtagcagagtgtctgtgatccatccgatacaattgcaaagttataagagagcttcatgatcgagcatggattattagtaaagcatgaaatcccgaaaacgccagcgcgcgtggcgtcagcttttacacgtcgcaataatgcagaaatcgctgtaatgccttggaaatatgcttctgccggtgatgaatgcgccacaaggtacgggttaagcgcggcagcggaatcgtcagctccaccagcgatccgacttcaagctgctccgccaccacgcgtcgcgacaggcagctaatgcccagaccgtggcgcaccgcgtgcttgatggcttccgagttgcccagctccatcccaagatgaaacgccggtaaatgcgagagtaataaatagtcgacgatctcccgggtcccggagccgtgctcgcgtaaaatccacggcgcttccgccagccgttgcagcgtcacctcccctgccagcagcggcgaatccggcgcggcaaagaccaccagatcatcttccagccagggttcggcgataatatccgcggcgtgacagggaccttcaatcagcccgatatccacgcgcagatcggccaccgcattgatcacgtcctggctattgcccacgctcagctccagcggtaaatccggcagatcgcgtcgatagcgcgcaatgatttccggcagaatatagttgccgatggtgctgctggcgtagacgcggatcgcgccgttgtcgccgcgaaacagctgctctatctccagcgcccgctccagcagcgccagcgcccgcggataaagcagcctgccgtgctcgttgaccaccagccttttccctacgcggtcaaagagctgcacccccagctgcccttccagttcggtcagcgccgcgctaaccgccgactgggaaagcgccagcatttgcgacgcctgagtggtcgatccgctttttaaaacttcagcaaaaacttccagctgacgtagcgtgatatgcatatttttcctgcctttatagacgactcgcgatccgcggcgtgaggctgaggcccatcgttctcaaaccgcgaaaccgcgtttttaccacttatttcgattaattataaatatataatcaattttatatttaaaccagcgagtcgtatgcttttcccagacaaaggagaaggttatgacagcactcactttaccgactaaacatcgcccattgcggcactttgcacctggactggcgctcaccgccctgctcaccggcgcagcgctgtgggccggtagctttccggctatcgctggcgcgggcttcagcgccctcacgctggccattttattcggcatggtcatcggtaacacggtttacccgaaaatctggcagccctgcgacggcggcgtgatttttgcgaagcagcacctgctgcgtctcggcatcatcttatacggctttcgcctgacgttcgcccagattgccgacgtcggcgtcggcggtatcgtgattgacgttctgacgctttccagcacctttttgatcgcctgttttcttgggcaaaaggttttcggcctcgataaacataccagctggctgattggcgccggcagcagcatctgcggtgcggcagcggtactggcgacggaaccggtcgtcaaagcggaggccagcaaagtcacggtcgccgtcgccacggtggtgattttcggtaccattgccatcttcctgtacccggcgatttatcccttcctggcgcactggttcacgccggaagcctacggcatttatatgggttcgacgatgcatgaggttgctcaggttgtcgcggcaggccacgcggtgggtccggacgcggaaaacgcggcggtgattgcaaaaatgctgcgcgtgatgatgctggctccgttcctgctgttcctcgccgcgcgcgtgaagcaattagccccggcaaacggcggtgagaaaagtaaaatcaccattccgtggtttgcgatcctgtttattctggtggcggtgtttaactccttccacctgctgccgaaagcggttgtcgatatgctggtcacgctggataccgtactgctggcgatggcgatggccgccctcggcctgaccacccacgtcagcgcgctgaaaaaagccggcgccaaaccgctgctgatggcgctgatgctcttcgtctggctgattgtcggcggcggcgcgattaacctggccattcatagcctgatggcctgaagcccctcgctactcaggttgtattaaggatgatgtaactctccggctaagccgctatcattaccctccccccagcggcttaactggagttttttatgaaatatattggagcgcacgtcagcgcctccggcggtgtagccaacgccgccattcgcgcagccgaaatcggcgcgaccgcatttgccctctttaccaaaaaccagcgccagtggcgcgccgcccctctgagcgacgaaaccattgctgaatttaaagccgcctgcgaaaagtaccagttcggcccggggcaaattctgccgcacgacagctatctgataaacctcggtcatccggttgaggacgcgctggaaaaatcccgcgatgcctttattgatgaactctcccgctgccagcagctcggcctgacgctgctgaatttccatccgggtagccatctgcagcaaatcccggaagacgaatgtctggcgcgtatcgccgaatcgatcaatatcgcgctggcaaaaaccgaaggcgtcacggcggtcattgaaaacaccgccggccagggcagtaacctgggctttaagtttgagcatctggcggccatcatcgacggtgtggaagataaatcacgcgtcggcgtgtgcattgatacctgtcacgccttcgccgccggctacgacctgcgcagcgccgaagagtgcgaaaaaaccttcgctgatttcgaccgaattgtgggtttccagtatctgcgcggtatgcacctgaacgatgcgaaaagcgcgttcgccagccgcgttgaccgtcaccacagcctgggtgaaggcaatattggccatgatgctttccgctggattatgcaggaccgccgctttgacggtatcccgctgattctggaaacgatcaatcctgatatctgggcggaagagatcgcctggctgcgggcgcagcaaacggaagaggccacggtctgatatgaacgacagggaaaagcagatcctcaaaattttgcggcgcaatccgctaattcagcagcatgagattgccgatattctgcagattagccgctcccgcgtggccgcgcacattatggacctcacgcgtaagggggccatcaagggcaaaggctacatccttaccgagcaggagtactgcgtctcgctgggcgcggtgaatatggatatccgcggaattgccgatattcattatcctcaaccggtctccaacccggggaatatccagtgctccgccggcggcgtggcgcggaacatcgcgcataacctggcgctgctgggccgcgatgtgcatttgatttccgccgtcggcagcgacttttacggcgaaacgctgctggagcaaacccgccaggcgggcgttaacgtgcagagctgtatccgcctgcacggccataacaccgccacctacctctccatcgctaacccgcaggaagagacggtgctggcgattaacgatacgcatattttacagtcgctcacgccccagctgctgaatcagtaccgggatctgctgacgcatgccggcgtcattctggtcgattgtaatttgacggagcagtcgctggagtgggtatttaccctggctaacggcattccggtatttgttgataccgtgtccgagtttaaagcgcaccgcattcgcccatggctggggaagatccacacccttaaacccacgctgcgcgaactccagatcctctggggacaggctatcgaaaacgacgcggatcgcgatcgggcgctagcatggctgcacgaaaggggaactcagcgggtggtgatttgctcggaagacgacgctgttttctgtagcgaagcagggggtgaacgcttccgaatgagtctgccggaccatacgacgatagacagcttcggcgccgacgatgcgctaatggcagggctactttatagctatctcgacggtagcgactttaaagagagcgtcgctttcgccatggcctgcaccgccatcacccgcgccagcgacggtatcaacaacccctcgttgtccgttgataacgcgctcaatttacttcccggcgtggcgtagcgcgcaccgcaggcgcggtgcgcgcagcctgttatgccagaccaataaagaacccggcaatggtggcgctcatcaggttagagagcgtggccgccgccagggcgcgcagcccaagctgggcaatctccggcgcgcgctgcggtgaaatggccgaaaacgccccgacaaccacgccgatcgagccaaagttggcgaaaccgcacagcgcgaacgagatgatcgcaacggttttcacgtccagattgccgccggcttgcagatagggagaaaagttgaggtaggcgacgaattcgtttatcgccagcttttggccaatcaggctgcccgccagcgtcgcatcgctccagtcaacgcccataatccatgccagcggcgcgagcaggaagccgaaaattccctccagcgtggcgtgaccgtagccgaaccagccgccaatgccgccgataataccgttcagcagagcaataatcgccacaaacgccatcactaccgttgccaccccggcggcaattttcaggccggtcatcgcccctgacgccgccgcctcaataacgcttttcggcggcgtctcggtgaaggagagattgtcgaaagtgacctgggatgcttcggttgccggactcagcatacgggcaaacagaatcccgccggggatagccataagcgaagcggccagcagataatcaatcggcacgcccataccggcatagccgatcatcatcgacccggcgatcgacgccatcccgctgcaaatcgcggtaaacagctcattgcggttgagcttgttgataaacggtttgacgatcgccgggatctcattttgcccaagaaaaatggtggtcacggcgacaaaagactcaattttgctgatattcagcgccttctggaagatgcccccgagaatccggatcagcagccccatcacgccgaggtagtaaagcaggcttatcagcgcggtgacaaaaatgatggcgggcagcacgcggaaggcgaagataaagccggcgccgtcaaacagcacgtccatcttcgggccgaccagtgaaccaaaaataaacgcgcttccggcgtcgctataggacatgactttatgtaccccaagcgcggcctgctcgaccagccacttgcccggcggaaagtagagcatcaccccgccaatgacgatttgcagcagcagcgccgcccctaccgttctgacgctgatgcgttttttattgactgacagcgcaaaggcaatggccagcaacaccaccatccccagaagacttctcatgatgtccataatgatatccttacctggtggaaaacccggcgcgggccaggctttcggtatcgttgatatcggggcgggcaaccgcaaacggcccgcaactgccgtcaggctacctgctgatactctttggcaatctcgcaggccagaatggcgttgttgaagaccagctgaatattggatttcaggctgtctccgcaggtcagctccgcaacgcgggccagcaggaacggcgtactcgctttccccaccacgccctgctcttccgcctccttcaccgcccggttgatggcggcgttgattttctcttccggcatcgcgaacgcttcaggaatggggttcgccaccaccatgccgccattcaaacccgactgccatttcaccgccatcgctttggcgatctctttggcgctattgaggcgaatgctgacgtcaaacgggctggttcggcagaagaatgccggcagcgcagaggtttgataaccaataagcggaacgccaaacgtttctaaatattcggtcgttaaaccgagatcgagaatagattttgcaccggcgcagacgacggtgacgttggtatttgccagctcctgcaaatcggcggaaatatcaaacgtgtgctcggctccgcgatgtacaccgccaattccgccggtggcgaagactttaattccggccattgcggcaataatcatggtggacgccacggtggtcgcgccatttaatcccgcggcgacaacaaagggtaaatcacgacgactgactttggcgacgttatgcccttcgcggcccagcagttcaatttcttcacggcttaagccaactttcatgacgccatgaataatcgcaatggttgccggcaccgccccctggcgacgaatggtttcttctacttccagcgccgtttgcgcattttccggaaatggcatgccgtgagaaataatggtcgattccagagccactactggctgattatttttcaacgcctgctgaacttccgcagaaacctgtaataattcagaggaaatatttaattcagacatattctttctccactaccttttttacgttggcgtaagataattcagggttattggtgaattccgatgagagcgccagagaagagcatccctgagcaaacttcaccgcttgcgaaaatgaacagccgtcgagccagcagcaggcaaggccggccatcatggcgtcaccggcgccggtgacgttaacgacctgcgtttttagcggcgctgaccagccgcgttcgccctctttctcgctgtagtaaaccccgtcgccgcccatgctcagcaccaggcgcttcaggccacgctgatgaaaccagtcggcaacgcgcgcgacgtcatccgtgccggacagcgcgatgccgctcagcgtttcagcttcaattcggttcggtttcagggtgtgaatacgctccagatgctggctgattttcacgcatttccaggctgaaaccggatcgacaaaaacgggcgttgcgccgcagttttccatcagccaggcgagagcggcctcgctgatattgcaatcaacgacaatcaccgcagcgttgcggataaaatcatgatgctgtcttaaaaacgctggcgtaatatgttctgtgatgctcatatcattaatcgccaccagcatttcaccggtattatcaagcagcgataaatagcttgaagtaccttctccctggataacctgacatttatcgacgtgaaccccggactgggccgtttgttttaatagagagtggccataaaaatcgtcaccgacaaccgataatagccacgctgttttatttaacaaggcaatgttttgcgcaatgtttcgccctacgccgccgggagtatattttattttcccggggttagaatccgcatagttcaacgatacattggaataaccagcaacatccatatttgccgatccaataattacaacgtaatcattttcaggcataaaaataccctccagcataaaaaatgctatggcagtggaattattgaatatcaataaataagcatactcccattcatcacccctcagtaaacacatgtttgaatgtgaacatgtgtttatgttaagcggaatgtttttaaagtaaagaggtcagcaagagggatttcatatgaacatgaacaaaatcacaaaaaatgagccgtatggtttttaaacagtttaaaaatgcgaaggagagcacatacggcaggatgagcgggaggagatgaggcataaaaaaagggcagagaagactctgcccttgagaacgatttagtaggtcgatcaggctgctttttcgactacctgaacttcaggacgtttcagcaccgcgtaggagagccctgcgaccagcgtaccgacgacaatcgccatcaggtaaccgagtaccggcgtaatcgcgccaggaatcagcaggacgaacagaccgccgtgcggcgccatcagcttagcaccgaccgccatggacatcgcgccggtgaccgcgccgccaacgatacagcagggcaggacgcgcatcgggtcgcgagcagcgaacggaatcgcgccttcggtgataaagcacaggccgagaaccagtgcggctttaccgccttcctgctgcgctttgtcgaacttgttacgcgcaaccagcgtcgccagacccagcgccagcggtggaaccatacccgccgccataatggccgccatcggcgcataggtttgggtactcagaagaccaacaccaaaggcgtaggccgctttgttcaccggaccgcccatgtcggtacacatcataccgccgaggatcgcaccgagcagaaccgcgtttgccgtgcccatggtttgcagccagtgggtcaacgcttcgaggatcccggcaacgggcttaccaatcaggtaaatcatcgccagacctacgatcaggctggaaaccagtggaatgatcaggattggcttcagcgcctccatactttgcggcagtttcagcttcgtactgatcgctttcgccacgtaaccggcaaggaaaccagcgatgataccgccgataaagccggacccggtgcttaccgccagcataccgccgataagacccggcgtcaggcccggacggtcagcgatggagaaggcgataaagcccgccagtaccggcaccatcagcgcgaaggctgagcccccaccgatttgcatcagcgcggcggccagggtgtctttcacttcaaaggctttaataccaaaagcgaaggaaagcgcgatacacagaccgcccgccactaccatcggcagcatgtacgacacgccggtcagcaggtggcgataggcgccagcggactcttttttgccttccgccgcggcctgggatttacccgcaggctgatacggtttcgcttcaacaacggctttatccagctcctgagcggttttcttcagcgccagaccggtggtggtgcgatacatcggcttaccggcaaatttcgccagatccacttcgatatcggcagccaccactaccagatccgcctgttcaacttcttccggggtgattgcattgcccgcgcccacggagccgcgcgtttcaactttcacccaccagccgcgttttttggcttcggtttcaatcgcttccgccgccataaaggtgtgcgccaccccggtcggacaggcggtgaccgccacgatgcgtttcggaccgttggtcgctgcaggtacagcggcagcggccggggcactgtaaggcgttgcatggcttttggcctcaccgaggaacagctccgggtgcgctacggcgcggttaatatcgccgagatagacctttttgccgttcagcgcgctgtcggccggcagcgccgtgcccagcacaatcgccagctcagcgtcgttcgggttatcaatcagttcgagttgcgctttttgcgccgcagtgcttaacagggtcttcgccatataggcgcgagcctgtccaagcccggcatcaataatcagcagcgttttcattatgcctctcctgctgttaattaaagggttgtaagtcgacgcgcgccatcattgcggccaactgggtacgatcggtaataccgacattgctctgactcaccgccagcgcggcaactgccgttgccaggcgcagcgtatgttcgctggactcacgcatcagcaggccataaatcaggccgccaaccatggagtcaccggcgccaacggtgcttaccacttcaacggaaggcggcttggcaatccactctccggatgcgttaacccacagagcgccttcttcgccaagggagataaccacgtgggcaattccctgctcacgcagcgcatgagcggcttcaatcacatctttcatttcaggcagcttgcggcccgcccagatttccagctcgcgacggttaggtttaaccagccacggcgccgctttcagaccggcaaccagcgcttcgcggctgctgtcaaaaatgatgcacgggcactggctacgcagacgggtcatccagtcagtgaatgcttccgggctgacgccagacggcaggctaccgctcacgcaaaccatatcgaactggcccagccagctcagggaatcgttaacaaaacgctcccagtcgcccggcgtgacttcaaagccggagaagttgaaatcggtgacttcgccgtctttctccgtcagcttgacgttgatacgggtacggccctgaacaacctgaaaacggttagcaatgcccagctcgctgaacagctgctgaaaaccatcctgattgtctttaccgaggaaaccgccaacggtgacgtcgataccgagatctttcagcacttttgcaacgttgatccccttccctgcggcgtgcaaaccggtagtgcgaacaaggttaacctcaccgcgttcaatttccggggtaaaacccaccaggtcataggccgggtttaaagtaatcgttgcgacacgtctgctcatttatgcgccctccccaaggcctgcggcgatcgcttcgccaatcgcatccagcgcctgctgcgcatcatcaccctgcgcggtaaagcgcaagcggtgaccttttttcacgcccagcgccacgaccttcatcaggctgcggccgttggccggtttgcccgaaccatcaaggttggtgacggtaatgtcgctggagaattgtttaatggtattaaccagcatcgtgccgggacgcgcgtgcagcccgtgctcgttgcggataacgtattccgcgctgagaacatcttccgcaatcgcgtcgtcgctggtcagcagcgccagcagcgtggcgccatcagccttcagcaaacggtcagcttttttgtcgagcagcaaattgctcaggcgattaagcacggcggtcggctggtcatcggccatcgcgacggtgatcagtagagaaaccggctgctcatcgctggtaaaggcgttggccgcgcggctgacggcaacggcgctgcgcaggttgccttcggtgctgtcgttcagccagatgccctgaccgaggttcagcggtttatcattaatcgtacggctaacaaaggaagcatcgaccgcgccggcttctttcagccgagcggcattcagcgcctgcagggtcagcaggtcgctggcgacaacgtccagggtcagcgtctcgttatccagcttcagcgcttcgctctgcttttcacccatcaacagggcgcgcagctcttcagcggtcgtcgcggacttaagttgttcagcaacggagtcgtcgctcagcacgtgggtcagctgacgcagcagccccaggtgttcatccgagctggcggcgataccgatggcgacgtaggcggtttgcccttcgccccaggtcacgccctgcgggaactgatacacctgaacgccggttttcagtacctgatcgcgggtgtcggtggtaccgtgcggaatcgcaataccgttgccaaggaaagtggaggtttgctgctcgcgagccagcatcccgttgatgtagccgtctgccacgttgcccgcgctgaccagcgcggaggcaacctgacgaatagcctcttctttattaccggcctgctgaccgggatgaatatcctgcacagataactggaacatggttctcctctcctgctgaattgaatcgtttcagctactttgagaaaaaatgcgtcatctacctgccggagaatctcccgatgacgctgaaacgtttcaagaagtctgtacctttattagccgccaggcaagaaaagttcgttttctgataacagaagttagagatacagcacacttttgctgaagcgggagcgtcgaggccggaaaaacttcagctttctgctgaagtttgattttgaaacatctttttgatttattcgtgccctggtactgttcattttctgagtgacggcgtaaactccgcgactcctgaaaaccgatgaacgccgacatgcaaaacagtagcgccgccctgccacgacgcgggtttgatttcacctcttccgcctttctgatcgtcgccttcctgacgggtatcgccggggcactccagacgccaacgctgagcctgtttctgacgaacgaggttcacgtacggccggcgatggtcggcttcttttttaccggtagcgcggtgatcggcattctggtgagccagttcctagccgggcgttcggatcgcaaaggcgaccgcaagcggctgattgtcttctgctgcctgatgggcgtgctggcctgcgtgctcttcgcctggaaccgtaactactttattttgctgttcatcggggtatttctcagcagcttcggctccaccgccaacccgcagatgtttgccctcgcccgcgagcatgcggacaaaacgggccgcgaggcggtcatgtttagctcgattctgcgcgctcaggtatcgctggcatgggttatcggaccgccgctggcctacgcgctggccatgggttttggctttacggtgatgtatctcagcgcggcagttgcctttgtggtctgcggcgcgatggtctggttttttcttcccagcatgcgtaaagagccgaagatcgctacgggccatcttgaagcgccgcgcaccaaccgccgcgacgcgctgctgctgtttatcatctgtacgctgatgtggggaatcaacagcctgtacatcattaatatgccgctgtttatcatcaatgaactgcatttaccggagaagctggccggggtcatgatgggcaccgccgccgggctggaaatcccgaccatgctgattgcgggctactacgccaaacgtttcggcaagcgtttcctgatgcgcatctctgcggtggccggcgtgctgttttacgtcggcatgctaaccgtacatacccctggactactgctggccctgcaggcgctgaacgccatttttatcggtatcctggccggtatcggcatgctctattttcaggatctgatgcccggacaggcgggcgcggccaccacgctttataccaataccacgcgcgttggctggattatcgccggttcgctggcgggagtcgttgcggaagtctggagctatcacgccgtattctggattgcgctggtgatgggggtcgtcactcaggcctgtctgtggcgtattaaagacgtttaagggtatccgcgccggcttgcaccgtcacgaagtgctcagctcaagatgaagcagccaggtcatggcgtcttcgcgattggtggcgcacatttccgcttccggcttcaggctggcgcacactttcggccttaacggcgagccaaaaatagcgcagagattattttgcgatagctgcacgcagcgggtgtttgccggcttgccttgcggcatgcccgggatagggctggagatagaaggagcgatacagcaagctccgcattcagggcggcattccataatcgactcttccgataacgcttttagcagcccagcctaaacgttttacctgaagatagcaaaaccgacgaattccacttgcctgaaaggcccggcgcgagtagttttacgcgatattttcgaccctttaagtgacaggattaccgcaatgccaagagcgaatgaaattaaaaaaggtatggtgctgaattacaacggcaaactgctgattgttaaaaatattgatattcagtcacccagcgcccgcggcgcagcgacgctgtacaaaatgcgtttctccgatgtacgcaccggcctgaaagtggaagaacgcttcaaaggcgacgacatcgtcgataccgtcaccctgacccgccgcttcgttgacttctcctatatcgatggcaacgaatacgtctttatggataaagaagattacaccccgtatatcttcaccaaagagcagatcgaagaagagctgctgtttatgccggaaggcggcatgccggatatgcaggttctgacctgggacggccagctgctggcgctggaactgccgcagaccgtggatctcgaaatcgttgagacggcgccgggtatcaaaggcgcatccgcaagcgcgcgtaacaaaccggcgacgctgagcaccggccttgttgttcaggtgcctgaatacctgagcgcgggagagcgtatccgcatccatatcgaagagagccgctacatgggccgcgcggactaaactccgcgtttgcaacaccctggagggcagccagcggctgtcctttttattagccccttatccgcaatctccccctccgccaaaagctgttataccaataatagcgaagctaccgctaatctcaccggctctctccgcatactttgcggcctgaccgtttaccgcgacagaattgcatgatcaagttcacattaagcggataaataaggctcaccaatttaatttgttgtcatatatctttacactggccatgttaattattggttaatcaggtgtgttaagaatgacaaccattgcgacagccacgctgccggaaggcgtacagcttcctcgatacgatcgcagtcagctgcgttcgcgtattgtgcatttcggttttggcgcgtttcatcgcgcgcaccaggcccttctcaccgatcgggtgctcaacgccggcggcggagactgggggatttgtgagattagcctgttcagcggcgatcggctgatgagccagcttcgccagcaggaccacctgtttaccgtgctggaaaaaggcgccgagggcaatcagccgattgttgtcggcgccgttcatgagtgtctgaatgcgaaactggattcgctggccgccattattgagaaattttgcgaaccgcaggtcgccattgtctctctgaccatcaccgagaagggctactgcatcgatccggccagcggccagctggatatgacgcagccgcgcattattcacgatctgcaaaatccgacgctgccgcaatcggttcccggcattctggtggaagcgctggcgcgccgccgacagcgggggctaccgccgtttaccgtcctctcctgcgataatattcccgataatggacatgtggtaaaaaacgccgtgctgggaatggccgaaaaacgggaccccgagctggcgcagtggattgccgaacacgtcagctttcccggtaccatggttgaccgcatcgtgcccgccgccaccgatgagtcgctggcagaaattagcgcgacgctaggcgtggaagacccctgcgcaatcagctgcgaaccctttatccagtgggtcattgaagataactttgttgccggtcgcccggactgggaaaccgcgggcgtccagatgaccgatgacgttttaccgtgggaacaaatgaagctacggatgctcaacggtagccactcgtttctcgcctggcttggctatctggctggccatgcgcacattagcgactgcatgcaggatccgattttccgcagcgccgcctaccgcctgatgcttgacgaacaggcgccgaccttatccattcagggcgttgacctgacggcgtacgctgacagcctgatcgagcgcttcagcaacccggcgctgaagcatcgcacctggcaaatcgccatggacggtagccagaagctgccgcaacgtatgcttgagggtattcgcgtccatctcgctcggggcagccgctggccgctgctggcgctcggcgtggccggctggatgcgctacgtcagcggtattgacgatgccggaaatgcgattgatattcgcgatccgctggccgataagatgcagaaacgggttgctgccagcgatgaacaccagcgcgtggcggccctgcttacgctggaagagatctttggccgcgacctgccgcagaacccgcagtttgtcgctcatatcaccgccgcatggcatcagctcgccgcttttggcgcgcgtcaggcgattgccggcacgctgaacgcttaacaatttctgccttttagcggacagatcctccttctgtccgcggtaggacttctcttttcccctttttttcgtcaggatagcgtaactgttacaacattacatttaccctggagaaaaagtgaccaaaaccaatttgatcacggggtttctcggcagcggcaagacgacgtcgattctgcatctgctggcccataagcccgcggatgaaaaatgggccgtgctggtcaacgagtttggtgaagtgggcattgacggcgcgctgctggcggaaagtggcgcgctgctcaaagagatccccggcggctgcatgtgctgcgtgaacggtctgccgatgcaggtcgggctcaacaccctgctgcgccagggcaaacccgatcgcctgctgattgaacccaccgggcttggccatcctaaacagatcctcgatatgctgaccgccgcaatatacgagccgtggatcgacctgcgcgccaccttatgcgtgctggatccgcgccagctgctggacgaaaaaattgtgaccaacgacaactttcgcgaccagctggccgccgctgacgtcattatcagtaataaagccgaccgcgcaacggaggaaagccaacgcgcattcgccgcctggtggcagacctatgccggcgatcggcggttcgtcagcgccacgcgggggaatatcgacccggcactgcttgatttgccgcgccgcaatcttgcgccgcttcccgccagccccgaacacgcgcacggccacgggcagaaacagggccttgcggcactgagcctccctgcccatcagcgctggcgtcgcagcctcaatagcggccagggctatcacgcctgcggctggatttttgacgccgaaaccgttttcgacaccgtggccctgctcgaatgggcgcgcctggcgccggtcgggcgcgtaaaaggcgtgatgcgcatcgcggaaggagtggtacgcatcaaccgccagcagcgcgatctgcatattgagacgcagaacgtttctccccccgatagccgtatcgagctgattgccgataccgaaacggactggaacgcactgcaggcctccttgttgaggattcgtttaagttaagacggctatggttgccgtcgtttacccaacacacgatagttatgattaaaaatcgaattcccctaatcctgctgctgaacgcggcgggtgttgcgcttttttgttcatggtaccttcccgttaaccatggtttctggaatccgctggactcggcgatcttctatttctttaaccatctggttggcgtgagcaccgcttacacctggctgctggcgattatcaacaaccgcgcatttgatgcctgctcgctactggcaatgggcagcctgatgctaagcttctggtttaaagagcagagcgccggacgccgccgggtgattatcatcggcctggcgatgctgctggccgccgtcatcatcaatcagcttgcccagcacctgatgccggttaagcgcgccagcccttcgctctcttttaccgatatcaccaaagtgagcgatgtgatctccttccccactaaagatgcgtctaaagatagctttccaggcgatcacggtatgatgctgctgatttttgcctcatttatgtggcgctattttggtcgccgggcgtttgccatcgcgctggtcatattcgtggtgttcgcttttccacgcgtaatgattggcgctcactggtttaccgatattgccgtcggctcattaacggcggtactcattggtgccccctgggtattgatgaccccgctgagtgataatgtcattgcgttatttgagcgttatcttccgggtagaaaaactaaaaattaaatctatctttacaattaattaatatcattcataagggatcgttctgggtccctttttttgtccgcgcgttttttctcatccggcatcatcttcccgtcatagtaatcatgttagaaatgagtaaattgcgtattttttacccattgctgtcgctattttgccctttgccgatgattcactttttgtcgcaaaaatacttataagaaaatgcgtaaaaccgctcgccatcccccggttgatcgggtaacctcaatctcgttttgcctcgtcagcgacatcaattcagagaatgaataaatttgtgcgtcagtccacagttttatgcttacggaattgtctcattgcgaccaggtaattaggctctaacacgtttggcattttttataacgacattgtcgttaaggacaacaagggataacacacagcatggtcaaatctcagccgattttgagatatatcttgcgggtcgcccccgcgattgcagttgcggttctgctttccgcgtgtagttcaaatagtaccgccaggaatatgcattctgagacgcttgctgtgggtagtggcgatttatcatcactgcaagcctctcaggatgaatttgaaacaatggtccgcaacctggacgttaagtcccgcttgatggatcaatatgccagctggaagggcgtgcgttaccgcctcggcggcagcacccgtaaaggcatcgattgttccgcctttgtgcaacggactttccgcgaacagtttggcctggaactgccgcgctcgacttcagagcagcaggattccggaaaatcgatcagccgcgcgcagctgcgcaccggtgatttagttctgttccgtgcaggttccacgggccgccatgtagggatctacatcggcaacaatcagtttgttcatgcttccaccagcagcggtgtgacgatttcaagcatggatgagccgtactggaaaaagcgctataacgaagcgcgacgcgttctgagccgttcgtaatcgtcttctgccgttggttaatcccttggccaacgaaagaaataaaaaaaacactgccgaggcggtgtttttttttgctcgccagccaggaaacttcgtaaaataagcgatgtctttaagcagggatagaaaaagcgatttctatcagccccctggcgcaaatcaacaatacggactgactatatagcctatgcctacccgtcatctcgctccccggcgaaaaatctggctgaccagcatatgtgttggaatagccgtcgccctgctggccggtagcatccagtttatggtgatttatcacaaccgcgcggagcgtttcgacgccattattcataacgttcatacgtatctgcaggactactttcacgatttgaagcagacgattcagggcatgcagccgctggtcgatcaaccctgtgaaaacgttgcctcaggcttaaccgcccatgcggcattcagcccgaacgtccgcgccatcctgctggtcaaaaatggccttgcgttttgctcctccgccacaggcgctatgaacacgcccttaacccagctcattccgcagcttaatcttactcaagcggtcgatatggcgattctgcccgggacgccaatgatgccgaaaagcgccgcgctggcgctgtgggtccgcagcccacacggcgggaaagacggtatttttgtctcgattaatgccaacctgacgccctatattctctactcagcccgacagaatgatttcagcggcctggcgctggccattaaggacaccgccatttccaccttcagcaaccaacttatcgacccgcagacgctgctctcgccgcccattcgccagacgcaaatcgacggcctgccgctgaaggtttatctctacgcgaacagctggctggcggagaatacgcagtttgctctgctgctgggcgtcgtgtgcgggctgctggccgggcttttaagctactacatcctgacgattaaatcggacccgcgcaaagagctgctgctggcgatcaaaaacgatcagttctatgtggtttatcaaccggtggtgaggtcagagacgctgcgcatcagcggcgttgaggtgctgatgcgctggcgacatcccgtggccggcgagatccctcccgatgtgtttatcaaccttgctgaaacccagcagatcattattccgctcacccgccatctgttaaaactgattgcgcaggatgcgcctgttctgcaaacgctcctgcccgcagggagcaagctgggaataaatatctccccccttcatctgcacgcaggcagctttcagcaggaccttcagcacttcgccgccgccatgccggccggccattttagcgtggtgctggagatcaccgagcgcgcgatgatcgataaaaatcgatccttagggaacttcgactggctgcacgaacagggctttgaaattgcgattgatgattttggtaccggccatagcgcgctaatctatctggagcgctatgactttgattacctgaagatagaccgcggcttcgtgcaggctatcggcactgagaccgtcacctcaccggtgcttgatgccgttatcaccctgagccgccgcctgaagctcaccacggtcgctgaaggggtggaaacgcaggaacaagcggaatggctgcgcgaccacggggtaaactatttacagggctactggttaagccggccgctgacgctggacgcgctgatcgccgcccatgatgaaccggcgaaatatttcacaagccgctaagggtcctttattatttgctatcaaaggtcaggccgcttcaggtctgacattggagggcgtcatcctggttatttttgcacgcatcagcctgatcctgctgaccttatttagcctgcagagccaggcgcaaacgattaaagagagcgacaggttcgctattatcggcgaaccgaaatacgccgcgggctttgaccattacgattatgccaaccccgccgcgcctaaaggcggggcgattaccctcgcggccatcggtacttttgataatttcaatcgctacgccatgcgcggcaaccccggtattcgtaccgaaagcttatacgacacgctattcaccacctctgatgatgagcccggcagctactatccgctgatcgccgagcatacgcgctatgccgatgatttttcatggatggagatcgcgctcaatccccgcgcccgctatcacgatggcagccccgtcaccgccagcgatgtcgcgtttaccttccagaagtttatgaccgaaggggtgccgcagtttcgcctctattataaaggcaccaccgtaaaagccatcgctccgctcaccgtacgcattgatttagccaaaccgggcaaagagaacatgcttagcctgatgacgctaccggtgatgccggaaaaattctggaaaaaccataaactcagcgacccgctatccgccccaccgctggccagcggcccgtatcgcatcaccgcctggcgcatgggccagtacattacctactcgcgggttaaggactactgggccgccgacttaccggtcaaccgcgggcgctggaatttcgatacgctgcgctacgactattacctggacgacaacgtcgctttcgaagcctttaaggccggcgccgtcgaccgtcgcgaagagaacgttgccaagaactgggctacccgctacgtcgggcgcaattttacccacggctatatcgttaaagatgaatacaccaacacctcggcgcagaatacgcagtggctggcctttaacattcagcgcccggtattttccgaccgccgggtacgcgaagccattaccctcgcctttgattttgaatggatgaataaggcgctgttttatcactcctacagccgcgccaacagcttctttcagaataccgaatacgcggcgcgcgattatccggatgccgacgagctggcgctgttaacgccgctgaaaaaagagatcccggccgaagttttcacgcagatataccgccccccggtttccagcggcgatggtttcgaacgcgcaaacttgctgaaggcggatgccatccttaaccaggcgggatggatagtgaaaaaccagcggcgggttaatgcgaaaagcggcaaaccgttacgctttgagctgctgcttccttccggcagcagcgatcgctgggtcctgcccttccagcacaacctccagcggctcggcatcgtcatggatattcgccaggtcgacaactcccagtacagtaaccgcaagcgcagccgggattacgacatgatgcccaacgtctggcgcgccacgccatggcccggcaccgacctgcaagtctcctgggactccgaatatattaactccagctataacgcctcaggggtacaaagcccggccgtcgaccggctcatcgcgcagattattcgctggcagggtaataaagaaaagctgctgccgctgggccgggctctcgaccgcgtgctgacctggaactattacatgctgccgatgtggtatatggcgcaggaccgaaccgcatactgggacaaattctccttcccgcagacccgcgcggtctactcctccggtttcgaaaactggtggtacgacgcaagcaaagcggccagactccccgcggacagacgctaaggaattaagatgggtgcatatctgctccgccgactactgctcatcatccccaccctgtgggcgattatcaccattaacttttttattgtgcagatcgcgcccggcggtccggtcgatcaggcgattgcggcgattgagttcggcgaccgcggcggcttgcccggcgccggagatggcggcatggccgccagccatgcgcgtaccggggtcagcaacatcagcgatgggcactatcgcggcgggcgcgggctggacccggaggtgattgccgagataacccaccgctacggctttgataagccgctgcacgagcgttattttaaaatgctcggtgattatctgcgctttgattttggcgatagcctgtttcgcagctcatcggtactgcagctgattaaagacagcctgccggtctctatcaccctgggcctgtggagtacgctcatcatctacctggtgtcgattccgttggggatccgtaaagcggtcagcaacggcagccattttgacgtctggagcagtacgctgattattatcggctatgccatcccggcgttcctgtttgccattttgctgatcgttatctttgccggcggcagctatttcgatctctttccgctgcgcgggctggtgtcagccaacttcgacagcctgccctggtaccaaaaaatcctcgactatctctggcatatcaccctaccggtgctggcaacggtgatcggcggttttgccgccctcacgatgctgaccaaaaacagctttcttgatgaaatccgcaagcagtacgtggttaccgcacgcgccaagggcgtcagcgaaaagcagatcctttggggccacgtgtttcgtaacgcgatgctgctggtgattgccggtttcccggccacctttatcagtatgttttttaccggctcgctgctgattgaggtgatgttctcgctaaacggactgggactgttgggctatgaggccaccgtatctcgcgattacccggtcatgttcggcacgctctatatttttactctgattggcctgctgctgaatatcatcagcgatatcagctatacgctggtcgatccgcgaatcgattttgagggccgctaatgtcattttttagtcccgtcaatcaggcccgctgggcgcgttttcgccacaaccgccgcggctactggtcgctatggctctttttagcgcttttcgcctgtagcctgtgcgcagagcttattgctaacgataagccgctgctggttcagtaccgcggcagcttctacgttccgctcctgaaaaactacagtgagaccaccttcggcggcagctttgccaccgccgccgactatcaggacccgtggctgcaaaaacggctggcggataacggctgggccctgtgggcgccggttcgtttcggcgcgacgaccattaatttcgccaccgacgcgcccttcccttcgccgccgtcaggacagaactggctgggcaccgatgccaacggcggggacgtgctggcgcgtattctgtacggcacgcgcatttccattctctttggactgctgctgaccttcttctccagcgtactgggggtgatggccggcgccgttcaggggtattacggcgggaagattgacctctgggggcagcggtttatcgaagtctggtcgggaatgccgacgctgtttttgattatcctgctctcaagcgttgtacaggccaacttctggtggctgctggccattaccgtgctgttcggctggatgacgctggtcggcgtggtccgggctgagttcctgcgcacccgtaactatgattatatccgcgccgcgcaggcgctcggcgtcagcgatcgcgccattattctgcgccatatgctgcctaacgccatggtcgccaccctgaccttcctgccgttcattctgtgcagttcgataaccaccctgacctcgctcgatttcctcggctttggcctgccgctgggctccccttcgctgggcgaactgctgttgcagggtaaaaacaacctgcaggcgccctggctgggcatcgccgcctttctgtcggtggcggtcctgctgacattattgatttttattggtgaagcggttcgcgacgcctttgacccaagcaaggcggtgtagcatgacgcaacctttgttagatatcgataacctctccatcgcctttcgccagcagggtgagacaactcccgtcgtcagcgaactgtcgctgcagattgccgtcggcgagaccctggcgctggtcggcgagtccggctccgggaagagcgtgaccgcgctatcggtgctgcggctactcccgtcgccgccggtcagctatcctgccggcgacatccgttttcacggccagtcgctgctgcacgcggatgaacgcaccctgcgcggcgtgcgcggtaaccgcattgcgatgatctttcaggagccgatggtttcgcttaatccactgcatactctggaaaaacagctgtacgaagtgctctctttgcatcgcgggatgcgcaaagaagcggcgcgcggggaaatcctcgactgcctcgatcgcgtcggcatccgcagcgcgccccggcggctggccgactatccccatcagctttccggcggcgagcgccagcgggtgatgatcgccatggcgctgttaacccgcccggagctgcttatcgccgacgaacccaccaccgcgctggacgtgtcggtgcaggcgcaaatcctcacgctgctgcgggagctgaagcaagagttgaatatggggctgctgtttatcacccataatctgagcatcgttcgtcagctcgccgaccgcgtcgcggtgatgcagaacggccgctgcgtggaacaaaacggctgccgggcgctgttttccgcccccgaacacccttatacccgccgcctgctggatagcgagccgtcgggcgatcccgtcccgctcgcacccgatgccccggtgttgctgcgggcggaaaatttgactatcgccttcccgatacgtaaaggtctgctgcggcgagttgtcgatcataaccgggtcgttaacgccctcagctttcatttgcgcgcgggagaaacgctggggctggtcggcgagtccggatcgggcaaaagcaccaccgggctggcgcttctgcgtctgattcattccgatggcgcgatcgcctttgacggtgaggcgcttcagggacgtaatcgtcggcagatgctgccgctgcgtcgtcgcatgcaggtggtctttcaggatcctaactcatcgctaaacccgcggctcaacgtgctgcaaattatcgaagagggattgcgcgtccatcaaccgacgctcacgccggccgaacgggagcaggcggtgattcaggtgatgcaggaggtcggcctcgatccacactcacggcatcgctaccctgccgccttctccggcggccagcgtcagcgcatcgcgatcgccagggcgctggtcgtcaaaccgcagcttatcgtgctggatgagcccacctcatcgctggataaaaccgtacaggcgcaaatcctcgcgctgctgaaggcgttacagcaaaagcatcagctggcctatatttttatcagccatgatttacgcgtcgtgcgggcgttgtgtcatcaggtgatggtgctgcggcagggggaagtcgtcgagcagggtgagtgcgagcgcgtatttaccgctccgcagcaggagtatacccgtcagctgctggcgttaagctgacggtcagaagggattgttgccggagaaaggttccgcaatcgccacgccgaaatttttcaggcggcaggttgcagcgaattcgtcctgacggttaacaaacaggcacggttccccttcgcattcaacgacagagctgtcgacctcgatgtcgctaagcgcctggctgagcttatgcatgaccggccacgcgctttcgccatcggggctgagtaatttcaacgccacgaggctgttttcgctctgggcgccgttttgcggaatcggttcaactcttgaacctgcaaaaccggccagccagcgatagctctgcggcagacggtgtacgatagagagttgcagtgtattcacgtgtttaccccggaagcaaaatacttcacaataattttacatcaatactaacacattattgacaaccagtcctcttcctgcacagaaaacgcttacaccagtggcatagccgtgttattggtttgtaatgtaaaagtttataattgtgcagatggaacatcttcgggctatatgtacccgtttctgtgatctaaaacaacttttttatcgcaatcatgcgactttttgaacgatttgattttacataaaataaacaaatcgctgaacagagaagccagatttggttgacatgcatcaaaaaaaggggcgatatcgcccccctgaagtcgcttagcgcgcggctttgcgccgtcggctggcgtagaggtaaaagaggatggagctgctggcgcagaaggcgatagaaatcagcattggccaggcggtggtaaacgtcgccatcgacagcagcgcgccgacaatggcgccaatcccgaaacggaacgtccctgccagcgaggaagcggtcccggccatatgcggaaactcatcgagaatcaccgccatcgcgttagaggagaccatcgaaacgcagccgatgaacgccgccacgccaaacaccagcgcccagaaccccacgccaaacagcgcgcacacgaccatccacgccgccatcgcaaactggatccatagcccggcgcggaacatgttcagcgccccaacccgccgcacaaagcggctgttgatcatggtcatgacaaacaggaagacgacgttcagcgcaaaatagtagccaaagtgctgcggtgaaacgtggttgatattgatatagacaaacgggccggcgctcagaaacgagaacatcccggcgaagctgaaaccgcttgccagcatatagctcagcacccgcttgtggcgaaacagcgtcgcgaagttgccgagcgtagtgcgaatatgaaatttctgccggcgttccggcggcagggtctcgctaataaagaaggcgatcatcgccgaggctaatagcgccgccaccgcgaggatccagaagatcgcatgccagctaaaccacaccagcaccgctccgccgaccatcggcgccaccagcggcgcgacggtggtcaccagcatgacgaacgacatcatccgcgagaactcttccttgggatagatatcgcgcatcagggcgttaatcaccacgctcgccgccgcggccgccaggccgtggaaaaagcgcatggtgatcagcatatcgatagtctgcgacagcgcgcaggccaccgccgccgcggcaaaaaccagcgtgccccccagtatcaccggtttacgccccatgctgtccgccattgggccatataaaagctggcccagggcaaagcccagaatataggtactgagcgtcatctgcgcgctgccgtccggcacattaaactgcgccgcaatcaccggcagcgccggaagatacatatcgatcgacagcggcattaacatggccagcaggccaagaataaacacaatccctaatgaagaattctgctttgccgtcacgttttactccgcgcatgttggccgccaacgctggcaatttcttctgccgtcagcggacgatattcacccggcgccagcgacgcatcaagcgcgatatcgccaatacgttcgcgatgcaggccaaccacatgattccccaccgcggcaaacatccgcttcacctgatggtagcgcccttcgctaatggtcaggcggacttcggtcggcgtcaccacttccagcaccgccggtttggtcaggtctttctcattatgcagctgaacgcctttggcaaactgctcggcggtggactcatccagcggattttccagcgtcaccagataggttttttcgcaatggtggcgcggggaagtaatgcggtgcgaccactggccatcgtcggtcatcaataccagtccggtggtgtcgatatccagacgccccgcggcgtgcagcttgtgcgccaccggctcgtcgaggaaataaaggaccgtcggatgatccggatcgtcggtggaacaaacgtaaccctgcggcttgttgagcataaagtagcgcgggccggtctgctgaaccagcgtattgccgtcatactcgacgtcatgctccggcagaagcttgaaggaggagtcttttacaatgtcgccgtccacggtaacgcggctgccgcggatttcacgcccggcaatagcccggctaacgccaagttgctgagcgataaacttatcaagtcgcatgagatttttttagcctgtacaagtgctggagcgggcaacgcgcccgaaaaagaagaatttcatggggtagtataacgggctattaacaccactcaagggaaaagattcgtggcatactattcgcgagttaattaaccgccataaattcatgacatttacattacgtccctaccaaaaagaggcggtcgacgcgacgctcgcctggtttcgccgccatcatgaacctgccgcgattgtgctgccgacaggcgcaggtaaaagcctggttatcgccgaacttgcgcgcctggcgcgcggtcgcgtgctggtgctggcgcacgttaaagagctggtggcgcagaaccacgccaagtattgcgcgctcggcctggaagcggatattttcgccgcgggcctcaagcgtaaagagagccacggtaaagtggtctttggcagcgtgcagtcggtcgcccgcaacctcgaccagtttcagggcgagttttcgctgctgatcgtcgacgagtgccaccgcatcagcgacgatgatgacagccagtatcagcagattatcagccaccttcagcaggtcaatccgcacctgcgcctgctggggctgaccgcgacgccttttcgcctcggtaaggggtggatttaccagttccactaccacggcatggtgcgcggtgatgaaaacgcgctatttcgcgactgtatctacgagctgccgctgcgctatatgattaagaacggctacctgacgccgccggagcggctggatatgccggtggttcaatatgacttcagccgcctgcaggcgcaaagtaacggcctgttcagcgaggctgatttaaaccacgaactgaaaaaacagcagcgcgtcacgccgcatatcgtcagccaaatcgttgaatttgcccaaacgcgcaaaggggtgatgattttcgccgccaccgttgaacacgcccgcgaagtgaccgggttgcttccgcagggcgaagcggccttaatcaccggtgaaacgccggggccggagcgcgatcgcatcatcgacgcgtttaaagctcagcagtaccgctatctggttaacgtcgcggtactgacgaccggctttgatgcgccgcatgtcgatctgatcgctatcctgcgcccgaccgagtcggtgagcctttaccaacagatcgtcggccgcggcctgcgcctggcgccgggtaagacggactgcctgattctcgattacgccgggaatccgcacgacctttacgcgcctgaagtgggaacgccgaaggggagaagcgacaacgtgccggtccaggttttttgcccggcatgcggtttcgccaataccttctgggggaaaaccaccgccgacggcacgctgattgaacactttggccgccgctgccagggctggtttgaggatgacgaaggccatcgcgagcagtgtgattttcgttttcgctttaaaaactgcccgcagtgtaacgcggaaaacgatatcgccgcccgccgctgccgcgagtgcgataccatcctggtcgaccccgacgacatgctgaaagccgcgctgaagcttaaagacgcgctggtgctgcgctgtagcggtatggatctgcagcacggcgcggatgacaaaggcgcctggctaaaaattacctattacgatgaagatggcgcggatgttagtgagcgcttccgcctgcatacgcccgcccagcgtaccgcctttgagcagctctttatccgcccgcatacccgaacgccgggcgtgccgctgcgctggataacgcccgccgatatcctcgcccagcaggcgcttctgcgccatccggactttgtcgtggcgcgcatgaaggggcaatactggcaggtgcgggagaaagtatttgattatcagggccgattccgccgggccaacgaactgcgctaatcgccctcacgtctgaggttttggttgctgcaaacacctatggcggctataatgccgcccgcttttgcattcgcaaagcagataatctgcctgctgctgggtcgcctgtagcaggatttatatatagagagacatcaatgtttactatcaacgcagaagtacgtaaagagcagggtaagggtgcgagccgccgcctgcgtgcagctaacaaattcccggccatcatctatggcggcgaagctgcgccagtagcaatcgaactggatcacgacaaagtgtggaacatgcagaccaacgctgagttctacaacgaagttctgaccatcgttgttgatggcaaagaagagaaagttaaagctcaggctgttcagcgtcacccgttcaagccgaagctgactcacatcgacttcgttcgcgcttaatcgccgactgaaagttgtatggcaagcgccccgctccgcaaggttcggggcgttttgtttatcagtcgagtagcgttgacctgttcagcgcaagatgctgcaccagcataatcgttttcgcatcgacgatttccccttcgcgaatagcctgcaacgctttttccagcggccactccagcacttcgatatcttccccttccgtcgccagtccgccaccgtcgccgcgccgatcgtcggcagagtattcggcaatgaaaaagtaaagcttctccgtcaccgaaccggggctcatgtaagcggtgaataccggctcaatacgcgtgacgcgaaaaccggtctcctcttcggcttcggcaacgatgcgcgcttccggggaagcgttatccagcagtccggcggcggcttcgatcaaaaatccatcatgaccgttaatccacaccggaaagcgaaactggcgaaccagcactaccgtttgcttttcacgattgtagagcaggatcaccgcgccgttgccgcggtcgtaagcttcccggctctgctcctgccagcgtccgtcccggcgcaatagttcaaaagtatatttcttgagcgtgtaccagttatccgataacagcgtttcgcggatatggcgaacgcgcggtgcgtcagcgtgcatgtttttccccttttaggtgacagttagcaacataacatgcataatcgtgcacaaacaagatcactcatgaaggtattttgatgctcgccagccagagaaaacagcagattttgcagatcctcgccgaggaaaaacaggtgatgtccggggatctcagccagcgctttagcgtatcagaggactccattcgccgggatctgcgggagctggccgcggaaggcaagctgcagcgcgtccacggcggcgcgctgccggtttccgaagccatcgcgcctattgaaacaagaaagaacgtgcaaatcgcctcaaagcagagcattgcccagcgcgcggttgagctcattcagcccggtcaggtagtggttgtcgacggcggcaccaccaccggggagatggtgcgcctgctgccggataacctcgcgtgtaccgtggtcacccatagcccggggattgccgtcgcgctggtggaaaaaccgctcatcgaggtgattttgatcggcggccggttgtttaaacattccgtcgtcagcgtcgggtctgcggccctcgagagtatttcccgtatcaacgccgatctgttttttatgggcgtcaccggcgttcacccacgggcgggattcaccaccggtgactatgaagaagcgggcattaaacgcgcgctggcggcgcgggctgccgaaacggtggtgatggcgtcacaagaaaagcttaactccgcgtcggcctttgccatcggcgagctgggggcagccagtacgctgatcgtggatacgaccctggacgaggcgctgcgacagcagctaaccctggcgggggtagaaatcctctacgccctgtaatgcgggttcaggcaaaaaaaatcccgactcgacgtcgggattttacgcattaatttccgccagaagtacggcgctgtagctggtcgcgcaggttcggcggcgtgccttttatggttaaggtatccgtagccggatcccagaacacccgctcgcccagcagcatagcgtcaaaattaatggttaacccgccgccgctgccggcaaacttggttaactgacgcagcgtgctgcgatccgccgggaagctctcttccagctcgtagccttgttcggcggtaaattcctgaaaggtcttctcgctgacgcccgccagctctttcgacagcgactccagctcgatttcctcaccggcctgcagctgttcgttgcagtagctgtatacctgctggcgcacgttttgacgttcagatttatccagctgcgcatcggcggcgaaatcatccagcgcctgcagcaggccgcggttctgcgctttggcgttcagcccttcgctggcgccgaggaaatccataaagaaatccgccaccttgcgccctacccgccccttcaggaaggtcagatagcgcgttgactccgggttggtttcccactcggttaaatcaatacgcgcgacgatatccgcgtgattgatgtccagataatgggtggagctgatatccagctcttcgttgactcgcatgctgcttaggttgttcagcaccgccaccatcagatattccaccgccagataacgatactggcaaaacagcacaataccgccttctgcaaagggatattttgccagttcgtcgcgcaggcgcccggtagcggcgcggctaaacggcaggaacgcttcttcgcccttacgctgcccgcgcagcgcctgcgccagctcgctctcttcattaaacaggccgtaggctttattttttgcgctgtagacacgatgtagttcggccatcatctcgacaaccgtcgccgtcggctccagcaacgattcgcgcagcaccagctccagattttgttcatcacgtttgattaactgatgcagggcaatctggtcgatatccagactcatgttaaactctccttttagaccgggcggtattcaaccaccgcgggggcaacgacgcaaccgccgagtgactctttgcgagcgaagccgcgcgcttttgcgtcgtggcgaaaaaatgcggaaaaaaagctgctgctacggtaatatgttgccctttcacgaacaaacagattttgagtttatgccgcaattatcccgctatagcgatgaacacgtcgaacagctgctcagcgagctgacgagcgttctggaaacacataaagcgcccgttgacctttcactgatggttctgggcaatatggtgactaacctgatcaacagtagcgtcgcgccggcgcagcgtcaggccatcgcccgttcttttgcccaggcgctgcagtcatctatcaacgacgatccagcgcactaaggataacgaacaacagtatatggtgactcttcgtcagccctaccgagaaaaagtctcccagatggtcagctgggggcactggttcgcccttttcaacatgttgttggctatggtgctcggcagtcgctatctgtttgtcgccgactggccaacgacgcttgccggacgcctcttttcgtacgtcagcctcgttggtcacttcagcttcctggtctttaccagctacgtgctgattcttttcccgctgacttttatcgtcgtctctcagcgcttaatgcgctttatctcggttattctggcgaccgtgggcatgacgctgctgctgatcgacagcgaagttttcacccgtttccacctgcatcttaatccctttgtctgggaactggttatcaaccccgaccagaacgagatggcgcgcgactggcagctgatgtttatcagcgtaccgatcattttcctcctggaaatgctcttcgcgacctggagctggcagaagctgcgcagcctgacgcgccgccgccactacgcccgacccgttgcctggttcttctttatctcctttatcagtagccatctggtctatatctgggcggatgccaacttctatcgtccgatcaccatgcagcgggccaacctgccgctctcctatccgatgacggcgcgccgtttcctggaaaaacatggcctgctcgacgcgcaggactaccagcgccgtctggtggaacaaggcgcgccggaagccgtctcggtgcaatatccgctgagcgatctgcgttatcgcgatctcggtaccggttataacgtgctgctgattaccgttgataaccttaattattcgcgctttgagaaaaacatgccggcgctggccgggttcgcgaaagacaacgtgaactttacccagcacatgagctccggcaacaccgctgacagcggcatgtttggcctgttctacggtatttcaccgagctatatggacggcgttctgtctgcgcgcatccctgcggcgctgattacgtcgctgaatcagcagggttatcagctgggcctgttctcatcagatggctttagcagcccgctctaccgtcaggcgctgctgtcagatttctcactgcccgtcgcgaaagcgcaaagcgacgagcagacggcaaaccagtggattaactggctggaccgctacgcccaggatgaaaaccgctggttctcgtgggtttcgctcaacggcactacctttgacgacgggcagcagcaaaacttcgtccgccgctacggtaacgccgcgggcgcggtcgatacgcaaattggccgcgtgctgaacgcgctgcgggaagcgggcaagctggacaacacggtggttatcgtgaccgcgggccgtggaatgccgctgaacccgcagcatgagcagtttggctggtcgcgcgagcagctgcaggttcccttagtgatccattggccgggcacgccggctcaggagatcgcgacgctgaccgataataaagacgtgatgacgacgctgatgcagcgtttgctccacgtctctaccccggccaacgagtattcgcaaggtgaggatctgtttagcgccgcccgccgtcgtgcctgggtcaccgcggccaatagcgatacgctggccattaccacgccgaaattcacggttgtgcttaatcacaacggcacttaccgaacgtggaacagcgacggcgagaaaattaacgatcaaaaaccgcagctcagcttgctgctgcaggtgctgaccgatgaaaaacgctttatcgctaactgattgattatttataaatcaatcagtcatttcccggcttgcattcgcttggggaacgggtaatattgttccccacgaatcggcacgtagcgcagcctggtagcgcaccgtcatggggtgtcgggggtcggaggttcaaatcctctcgtgccgaccaaaaatcccagtaaaaccagcctcttaaggctggtttttttatgcctgttttttgcgcgtggagttaatggggtgaaactggggtgaaaccccgacaaaactacatgaccgggcaatcatcaaactcccctaagccacgtttccattgacgcctggagctggctgatccgctgacgaaacgccgcgatatccgcttccgccttagtatcaaaggcttcgctgcaggagtgctggtcctgtagtttttgaaaaaatcgtgattttgccgacatacttttactgtccgtcaggaaattagaggtgggtctgtgcatcaagatactgctgctgtttaaggtagcgtatcagcacgcgcccttcaggcatgaacgccgtgccgtaacgcaccagaccgatgcccctgagttcggcatcaatggcataacgcaattcccccggaatagtctgctcaagcagaaccacatcaattttcttaagccgcggctcgtacttcagcagtacagccgataacgctcccatcagttcatgggcagtccctggcatcccctgcaggattttagtcatatccggcagaccgtagtccggcaggtgcgccagcgtaccggcgcggcagttgaggatacgctgcatattgtccagcacagaaatgatggtctggttctgctcgctgacctgatacagatcaatgccgccagtaaaattgccgtagagcgtttcatatagtgacggacggggtgactcactcatctttcagcgcctgcagggtcagccggttgttgcccgcttcgatgacgcgtgccttatccggatcgaggtcatcgcggctcagcaccacccgccaggtgttgttctcctggtccggcgacataaacatgccagccaccgcaacatactgcgcggtttcctccatcggcatatccaccatcaccgccccacccggctgcagacgaatatctttctccgctatcaggtctgctttaatagcctgactgtcagccttaaacagtgacgggtagtccgtcgtgtcgaaggtttttcggtccttgagctggtaaatacgtaccaccgtcgacagtgccacgccgcctgcattgctgttgacggcctcgcgggcgcgaatatccagatgcagggtctttatctgcttataaaaaattgatttagtcacggcaacggtgccgtctgtcactttttgcgtcagcccacagccagcgagtatcagtgtgatacccgcggccagcgcaatctgaggaaaattaccagcgataatcgccatcttcatcggtctccctgcggtgaatattttcctggacccgctcatagcggccaagattgatgtttataatttgagggtgtacgacggtattcgtcgcattcagcggccgcatcacggcggtgcggcccagctgcactgcaccagctttgggtttagtactcatcgtcgcatccggcagcaggcaacggtcgacacataactgcaggcgcacatcgagccgtgagccaagatacacatgcagcagagccattaaatccgtgtgaagctccccgcccggtagccagcccggcacttcagccgggtcagtggtggtcagacgcatcagtacctgactattcacatcggtggcatagttacccatcaccggacggtttgtcagggtgacgggctggctgacgctcatggtcaggggcttcttcagcggcacgcggcgtttgtcgtggtgccagatttttacctgcgtgccgggtgccagcagacgcaccagtgaggccatgccttctgcagtcctccccggcagcatcatgaccggcagcagcgccagaaagcgtgaggctggcgcggcgatactgtctgtacagccgtcaatcccgagcccggccagccccagcaggtactgcgaagttttgtccttaccgccttcctcaaaagttgccggatacgaatatttccgccagatgcggtagtactgggcaatcagccggtgattgaagatatcgaggaaatccgccgtggcctcgtacccttcccgccgctgggtgatatcatcgatatagtgcgtcggcagcggagactccacgccataaagccccataaaggtgatacgtaccgtcggcggaagatgcgggtactcagcagcgtcgaatgacctgatttctgaagccgggaagcccatccccgggtgcggcctaaaacgtaccggctcatgacgtacctgccaggtgctgcccgtaaccggtttgtccggctggctctgctccagcaactgacagaagcggtaaaaattgatatatggcagccggtcacccagccgctccatcagcctggcaggcgcggactgtgattctctttccaccggatgcattttccttctggctgaacgatgagggtaagctggttgaactggttcatatcgacatacaacgcaaaaaaccggttaagcatttcaccaaacagatgaatatcgccctcaccggtaaaaccattgctgtcgagggtcacttcgatatccaggccccgtagcaggtagccctgctcaaagcgctgaaggcggtgatgctccacatgctgaatagcctccagacgccgggtgttcagttcatcttcctgccagttatagagcgcaagcgtcccgcgcagcacttcagcggtactcagcatattcaggaatccggagcccaggtggctcagcacccgccagtggaatcggtcttccgcaggcgggtagaccggcagcgtcggtttgcagaggttgcgtactgaaagcggtgtactgaccacctgctcacagcgatccagcagcgtgctctgcaatgcccggcgtggtaactgaccgttggtgccggtgatttgtagcgacacggcttcgcggtcaaggaggcggtcatcttcccactggtgaccgccgaggataagccaggtgtcatacagcccggtcacactgcgcttcacgcgggtatggtagtaacgcggtggtgcctggcggcgcatcatcccgcctttatggcggaaggagctgaacggcacatactccgcgtcgttcgtccggtttgagccggtgaccgaatccacggagtaaatctcggtgtgtccgtcctgcagccgtttggggcgcagcaggtactcactttccaggcccgtaatggtgagcgggtccgcctccagggtgaacagattaatcaccggcacgcagtgcagtcgaaccgcgtcatcggtgaccggcagatcagacggccacggcgtgctgaataccacttcaatgtcgaagtactctgtcccggcaggcggcgtgatgccgtccaggccattaaagtggacaaacataaacttgtcgcggaaggtgaagtactccagcaacaactggtagccgctgaaggcggtatcccccttcggccacagcccgtcttcctccgaaaatcctcccggcgagaagtacccgtcaagccggatacgatcggtctgcccgggcagacgcatatacagggcagcctgtcgtttcgtgagcatcaggtgcagctgactgctgacgggtgcatctgcgccgagatagaggctcaggcggctgaggtcggcatgcgaccagtccgcctgactactgcaggccatgcgcatccgcaacagcgaacgtccgtcaggttcggtggtcatggtgaccgctgagacactcaggggattgagcattacatcctgggtcgtacggtaacgacagaccgtgttcttcggccccaccgggcgggagtacacctccaaccccgcgggcacgacttcggccattttcatggcatgcagcgctggggtaagtgccaccaccgaaagcgacggaatggtacgcaggtaatgcggccagagcatactgaccagcccttcggtgagttccggcaggtcgtcgtcaatcttttcgcgcagccgtcccatcgagaaagcaaagccttcaaacaggcgttcgacatacggatccggtgtaccagctttatccaggtcgagcatcgctgcacgatcgggatgggtttgcgcgaactcttttgcggcttcacgcaggtagcgcatttctgcatcaaaatagcgcagggtctgatctttcatatgcgttccagcaggagttaaccctagtgttgttgcccgatgattaagcgtagaaatgtgagggagacagggaaaaatacgatatctgcagcaagggccacaggtgtgagcacaatgttggtagcaagattcttcggataaaaatcggtttcattgtcggtcgcgtaaaattcaactttatactttcgccccagtgactcggtattggtgaatgtataattgagacttttccttggaagaactacgccctcaatattgacatctttccagtatccccccttcgagttctggaagcctgaatgcttaatgacatctatatcgtattctgaaagctcaccttcgcttttattaacccagacacgtaacgaatccttaaagcgaaagatagcatccccttttacagaacgagccaactgaagcttgagcgtattttcttctttatctgcaatcagtgggattttgtctgttaatttgtttaaagacagtaactcatcagccccccttgtcagaatatagacatttctttcacctaaaaatgcgataccttccgaaggaataatcagaggtatattggtcttatcctgaacaacagaagcggagatattttcatactgaaaaatatcggtgacactatcctgcattttcataacattcacccgatgactacctgagactttatttcctccccacaaaattgcagtacacccggacagtaatagcaccatgacaatgcatgctgcaaatttagttattttcatgaaagtttatattcctgaaatcattaatatcactggcatcatttccggcacacatttctttgcattaaccgcacaggactgccgcgcgggcaggatcgatagcaattagcccagcaagcaggctgtccatttcagcgtgcaggcgagctttgtccgactcagcccgacccgctttaattctcagcagcttcagatggcgggcctgtacctcaaacagcagctcagactcccagttcgtaagggtgcagctatggaccaaagcgctccagcagaccggccagcagttcaagtccttcagccagtccctgttcaccttcgcggtgcagcttcgcccggcagtagtacgtcgcgacgcgaatgtctttcgcggtcgtggtcagcagcttctctgccagccggcagatgagttctgtatccgcaccggaaagtttgttgacctcctcgcgcatctgctgaaagtcatcgtcatagcccgggtcttcgccagcgggcgattgcccggacagcggctgcagccagctgccccactgcgccactcgctcacgggttgctacaagtaatggttcctgttctgtctggcaggcgctcagtaatgtattcagcatgctcatcagtagacctcttctacttcgctggcctcgctggcgaccaggcctgattcggccacgccagtcgtgctgaaaatcgtctccggcagacggaagttgcgcagtttcagcagcgccagtggcccctcgcccgcctcggtacgcagggtgtaattgagcgtgcgcccgtcctgtgctttccagctcaggctgtaactgctaccaacgcccggataagcactgaccacagctttatcgagcagacgtatccagccccaggcgccagggatatcggcgtactgacgggttcctgcctgcgtgcttacccagctcaggttcgcccccggagcctcggtatctgcaggccaggcgaagcgcttccacgccggcaactggtttacatagatcagcttctggctgtcgataatcatgtcagtctgcattaccccatcggcagtgcccggacgcaactcgaagttcatgccggcactgccttcggtgaaagcgacatccgagatatggctcagggtgttgatggcattgaggaacgccggattaaaggccagcccctgcgagttgatgctgtccggcacccagtggttgccctctttgtgcagcacgcctctgaggcgggtttgcaggaactgcgcaatacgcccggaatctgcattgaggtatttagccagcagcggcagggatacatcactgctggaattgttaaacggatagcgtccaccgaaggcactgttccactcagcaaccacggcctgctgccactgggcattgagactttcggccgccggggtcagtacctgctgccaggcctgctccatcggctgaacaaacacggtacggccaaagccgctccactccaggccgagaccggcggcaatcaggctgccgtagtcacgggtttcggtgaggtcgaccgacttaccctgaaatacggtctgcgccagcgtctgtgtcatcgcctgcgggtcggcggcattggtcacctgctgcaggcgcagacgcacctgcgtcacgcgggtcaggaacgactgcagactcaactcctgtgcacctgtccggtttttgtccatcagcgccagtaccggaccaaaggttgcatccagcgggccgtgaacaccagcgctctgatcaatggcatcctggttatcaccgccgagcagattcttcgccgatttcaccagcgaatccgaaatggcttcgcctgtctgcccggtgcgtccctgcacattcagggtgttcatcagcgccaccagtggtgactgacgcacgtcggccatcagggtcaactggtcaatggaatccgacagcgtggtcgcctggttccagcgcaggctgttgaggaactcaagccatgccccgctgaagtcggcaaagtaacgttccgtcaggcgatgtttcagagcttccggtgaggtctcgtcctgtttattcatctgacgcttgctgtcagtcagcacccagtctagtccgtcccggcgtgccttcaccaccttctcgatagcgggctgcacggcctgctcccaggcctgacgcgtaaacatcccgggcacgacttccgtggtgctgaacagacgggatgcatcggtatcgccggtcatgtcttccaggcgcatatcgacatagaggtgcgacacctgagtgagcatcttctggtacagggtcgattcgctgttgcgtacgcccatcagacgaaccagcagggaacgcgcctggctgaccagattttcatcagcacgcagtttccattcagggtgcgcaaccagctgcacgccataaaacgacagcagagaaggcgccatccccagccagacgccgttttttacaccgtcacgcatcggccagtcattcagcaatgcagagccgaaccaggccgcgtccatatgttccggacgcgccagcatcaggtagagtttgagctggtcataagtgttttttgccatctgctcacgcagcgggctgcccgctggcaatacattaaaggcattaagttgtctctgcagatggtcagcggcggcatcccgcagcagcggcaatgcgctgtcctggtaacgtggccagagtgcgtccagcaacgcattgttctggcttagtccggcctgctcgtaccacggcacgccaaactcagagcggtactgcagacgggacagcgttttttgcagttcagacagcgcgtgcaggcgctgctccaggggctgattctgtcgggcggcaagtgccgcctggacattagcgctgtcaatctggctgcggttggtgacatacgcgatgcccatccacgcagcccagccgaccatcgtaagagcaacaacagacgccatcaccctgcgccacggaatgccgggcttgtacggacgtagtccggcagggagtgtccggacagactccggcagggcatcccagcgcttatccatgccccagtggtgcggcacggcacgttcggcaccggctgaaggctgactgaacaccacgccggccagtagaagcggacggtacggattgagtatcaccgacagcggtgcggtcacgctttccggctcacgaatgagctggtcggcaagcgtcagcaggaagttatgtttcacttcaccgcaggtctgctgcagcccctgtgaagtcaaatctggcgtcagggcggacagttgctctgccagcccttcggtactgcaaccggcaggtaacaaacagccggttgcctgcgtaatgcgcccttccggtttaccggcgcgtgggtgcagggaccagacatacagcgggagctgccagccaagcgcttccatacgtatgctgatggcgtgagacaggaaatccatggtgctgtctgaaggtaccggcagcggctgctccagccctggcgctgagagctggtcaaacgctgaagtgacccataccatgccatccaccggacggcggcgcagtttgcgcagcgcggtaagccaggcactgtcggctggcgtactgaggtcaccgccccacagtaacagcgtgccgcgatcttcctgccagagctgagtcgtgagccctggggtcagttgctccacctcagatacagtgccagtgaccagcaggatgcgtgttttacggccccagcgacgaccatagaggttacgcatggctgcacggatggtatcaacggtgacattgcgtggcggtgtctgcttaacgcgaccttcatcagcaggcaggagacttttacgcttcgcctgaaaacgcgaccactgttgtttaatcgccaggctaatagttttgccatggcggacaagtagcagaagaattatcaccgccacagataccagcagtttaaggctattactggtaagtccgaacgcatcgccctttttccagatagctaatccgatcgcggcagcaatcagtgcagtaatactgatgcgtccccagttaccacgccacactgagttatccttcaccattcatcagactccctgtagttacggtattcacaaatcgctgctctttgtcacccgaaagcatcaggcaatcttcttttgtgagcgcggttatgtcactaacgacggcggcgataatccacggtgagaaaggaccgctaagtccggcatatttctccagccaatggcactgctggggtttccagctgccttcatattgttttgcactggccaaaatagtggataaatcctccccccactccatgctgtcgcccacaattgcgcgcgcagcgatcgcttgtgattgggtcgagaaaaagatatcgagctcttcactcagcatttgggttgattcaagcgacataggccgaagcaggcgagcgtgatggtttagctgatacttcgttgctacatcatcagaagtcagcattaaagccgagagggaatcactatattcattccctccctgagtctggtgaaccaacaaaagctcaacatccagaatcggggctttaaggcgttcgcccacccaatcgaaggcccggcctttaagaatcgtcagtaacggtacgggataggccattccaactaactggagccagcatgctgaaaattctctctgcaatgtctcatcaggatcgtgtgaatcagtcagtaaggttgcgtggaaagggaggtctgataagcgctgtaattctgatatgttcagtcccccaatcaatgctgaaaaagcatcttcgccagcaggtaacgttattccccgagaaagagagctactctgctcgagatctttgggggattgcagaaatgttgatggtgtcaattcatcaggcaggattacccggctatacagaaccgccagataacgaccggcccatgaagtccattgctgctgtgcatagtctgcctcatcggattcaaactgatgaagatccattgcgtggttatacatccagccgcgaatacaaatcgttacgaaccagataaaaagagggcctccggcaacaatccagaggttaaatttttgcaattcacccagaaactgattggcgtgaagtacaaagagcaacactccggcaataacagcaacaaggcctgcaatcagccagatgaccagtgaaggctcatcaggttctgcagcaattgtggctttctgacgctcccagctcataacttatcctactgaacaatccgacgcactggagataacatggcagccacattcacattcgcagccatccacaacaacaggcttcccatcagagatccattctggtgatccttttataatggcattgacaccatgcccttcaacagggcaattaatctcatcgccaacaagagctactttctttccgttcacaatcatggtcgaagatgcagatataacctcaccgccgtgagtagttttatccccaagcaatacaaatcctttggacatagcacacctaacaaattagtttacacgttttaattgaggcgacggaactgaatccatccgtttttaatttgaggaacaatatcatcatcgagaaatgcagaacaaataccgagttcaccgactgcgaaaatcgttgtagggtaacctatttctattccctttcgcccttcagggtcaggctcagaataatagggaaggccattctctctataagcgttaacatccaagtattgattgcagtttacgttaaatccattatcatcaattaatgacaacgggaccaactcatccttttcaaactttaactttttcccagaaattctctcaccaacaaatatattttctgtggtatcctctgtgaccattcgaatagtgcttgaagaaataaccatattcccctcagcaaatctagcgccagcccatccaaccgtattcaaatcagactcaacacttttctgataaaaatacacagtcggaacaccacctttaacttcaacatatatttcattatcatcagtaaacttaggaacaggacttaagatatatttacccatatttttcctgggtttgttagctaaaacgccatactctttcatagcaccatgttctttataaacccaatatccataatacagtccatcttttaccttaatagtattgcagaatgcaaaaaaaggaacaacgacaataaaaaacaatatttttttcattgtacaatctccacatggaatgctggctcaccgcgattttcaaacgggctgatatatttcattttacttgggttatcttttgcatattttgtaatagccttatcaaaagcccgctgcaaagcggcaggcaataactttttacttatatcaaatacatttctctgagcatacgattcaagagaaacgcagtgttttgaaacaagacgcccatctttttgtaaagaattgactttatcaaccatggcttttttaacctgattctccttacttttatctatgccacccacagcgatagctgcttgtacaacctcccgtcccgcagcagcataataatcaagctgggattgtatccccttgtttttcatgttcatatacattgcatcgacttgtttttccgcggtgcgcaacgtactggtgatcataatcttatggacacctgcggatttcattatccctttcataatatcaagagaatgattagttaccagatttttcaagctgagaggaatatctttagaaaaatccaccaccggctcaaaatttttatcaacagaaacatttttagctttcccctcggaagtagtctgatgcttctctggttcatttttacttctaccagcaacagactgatccgtcgtcgtagttttaatatgaattacattgctttccttttccgagtctgcggacttgcttccttttggcaaaacaatatggcttctcgaatactctatggctgctttaacattagcattttcaaccccaacgcttttgagaatctctttcttggtctgctcagaaacatagcggctaacatatccatggtttttattactatcaggtatttttaatttcgcaccaatgcgcaacatatttacgttatggatcttattaatccttgccaatttctctactgatacactatatttcttcgctattgctgataaggtgtcacctttcttaacgatataagttagagtcttatgcttttcattggtatttttttcaacagttgctttagctaattctttgtaattatcagcaagaatagtaaacacaacttctgaacctgcgatagcattgactgattcagtcatcccgttttcatcagtcacacctttgataagaactagagttttctcataatctgacactaaatttgggcatgttgaacttggaaatggagagattgcagcaatataatttttgtttttgaatgctgtattatttcccgtagacagtttaaatttagtattaacttcagtattttttagtaacccttccacaactgataaatgcttagttatataaagcgcccacttctcgccatctgcgcttttctcacgcgtaccatcgagatattttcctaaactataggcaccatcatgatgcaacaaataaagccattcccagtattcactttgatctgatgtgtaactctccatcaccttcgatttgttaagtaaaaaggaataaataaccgcatagcatcctttttcagcgtcaaaaacttccgcattacgaagatctagctgaaaaccaagaatgtcttcagattgtgtcaatgcatctttgataaaaccaaccgttccttgtgctaaaccagcagcactagtagtccccgctgccgcatcggggttaaatccagactcaaccttagtggttaataatatataagatatctctttataacttaatccatagcggacagctatggtaattatcatatctataatagcatcctggacatctttatcagcatctcctattgtacgactgttacctcttagctttcgggatgtatctatatccggatagagtgagattaaagaaaatggtttaatctggtcatcaaaatatgtctttccctttttggcattcaaatactcatataaatcagacataccattcctcagcgattgctaataaagtctatgcgtgtattgtcgtaggggtttttcatttctcgagatctaagctcagaaagtttgttgcctgtgataaagttccctgaaagatcaataaatggggcgtcaatataggacaacaatgaaccctttacgctctcctcttcatccagcccgagatggtatccgatcacaatattttcattgtcatagcatttcattgtggagggtgtccaatcaccaggtttaactacattattgaaggaataaccctgtttttccaggagagctttttggctgttcgggatgtatggcaaagaaaactctttattattcgtgccgttctttattcccaagtggtaatttttgcatatattctccgttgggcttttttcattcacttggcattcagcactgacctttaccaaagctgagccacattgcatttgtgctgatttagcattccatgtgccacttgcaaaagaaaaaaatggagtaagcaacatgcataacaaaaatttaaacttaaaagtaatatcacgcacttttatttccctcacaatcactgcattggcaaccatcgtcctggaatgacatatctgaaaatgatgaacaatgtactctttccacaatattttcactatcgtaccaataatcactttgaatcatttcaacttcaaaaggctcattcgggtttgatgagtaaactggaactgtttcaccgttctcgtctgttctaccaaataatttctgcccattactcgatgtcaacatgtatgccgcagcggcaactggaactcctgcatcagacgatgccgtaaatttcccactatatccagatggaaactggggcataacactactcatgcttacactacccattttctgcgcattggcacatttccacaggatattaccttcacagcccagaataatattcttaccctgcaactggatgaacgacccatccaaatttttaagcgcaacatctttcgccgccgtgatctcaacccgcccttctgtactggttacggtcacatcctttttggctatcgcatcaagcgcatcatcctgagcctgaatttctacttttcccttagcagcaaaaagtttcattccggcctttcgggccagcatactcacggcttcacctgctgctacggtaaatcgtttaagtgcgctaatgtctgtattctgttgcgacatgatcccaacgctggcactacctgacgccatgcgaaccgcctgtgggctggtgatgctcacgccttcaggtgcattcaacaccattcctggctgcaccagatctttgagggcatcagtcaacttcacctgactctgaatatcagcgggtagcgcctgcgcggtttcagctgcgtctgacatgctgcgggcaatactcagtgcattctcaagctgggctatcgcctcctgcatggaaagcatcttgtccccggcaaacggttgtttatctgcagtgataaacacaccagcaccaccgcgaatggaaacatgccggtcggtgcgcagttctgccccttcaccacgaagctccctggaagcgtctacattgtgacctaaattgagctgcgtcttgcccccgaactctgtactgagcttgatgtgctcttcgccgcgcttgtcctccatccgcagcttgttcaggccagcggtacggatgacattgcgcgtgctgttggcttcagtgacgtgatcgacgtgacgggagtcatgcagggcgtgagctatatacgggcgatccggatcgccttcgtggaatgcaatagcaacttccgtgccctgtatcagcgggaagtggaagccgtatttgtctccgccgtaaggtttggcaaaacgcaccggcatactttccatgccctgacgcttgtcatcgcggtcagcatcaaatttcacccgatacatgcccgaggcatcctgccaggcgtagatatcgttatctttggcgctggtcactcgtgccgtcagggtgccgctgaccaccgggcgctttttagccgcagggcgccagcaacggttttcgtagtagggtatcgctacccatgccacttttagggcattcttacggctggcgtagtagccagtgcggataataacaacaccgttctccgtttcacggggcagtgttggcgggatagccatttcggtaatagtcagtacctgcgccggtccaagggtgtggtcggtgctgctgccggtcaccgtggtctgggtggacaggaagcgttcatgctccagacgcgcccagaagttaccggtttctgccggcggtgtaattttgtcgccacgttcaaggtgacgcgggcgataatggtacacatcaccgtaggtgttcccctcgccgtcgccgcgggtcatgtcagccggtacggacatcaggacgctctgggcttcgcggtggttgtagtcactggcggtgaccgaacgctccaccacgttatgccagacttgtacgccccacaccgagtcggccgcattgtcattctcccctgacgggctgttcagcggcagtttcttaccaaacgtccaggcactctgcttgtccgcgaagtgcaccacttcggtctgagtgtcaggctgcagggtgaagaagtaaaaaatccccacctctgccagcaggcgttcaataaactcaaggtcactttcctggtactggtttatctgttcccgttttgggtaggtttgtttaagcttgaattcatattcccaccctttcaaaccatgctcgccaagaatttgcgctaccacttccggcactgatttgttgacgaagaaacggtgagtacgaaactgcttatccagtaaggatataaagggttccagaataatttcatacgtaacctgatcgcgtgaaccgatcaggcgtcggaaatttgtcaccacgccatgaacaattttaccgacagtagaattaaatagttctcccacccctatgctcagcgtagcggttttacttaacatcatttcagccgtaagctccggatgtgaactggtaaaacgaatggtgtaatgatatagagcactcatttgttctaaaccatcaaaacgttccacatccaatggataagggcaggaaggaatatctagtttatagcgattaaggaccccccctgtcattttaaatatattttccatttctataactcctgtcccaggtcagaatgatattaaataaaaacaaacccaacagatatgatgaatatcatctataacgatcccactcatcataaatatatttcagggcaaatttataaaggccataacctatgagaaaggcgactatacctgcccctcctagaataaagcggtaaggattgtcagaaaagaagaaacagtagaaagagtaaaccatactgatagttcctagcgtcatcccaatgctggctacgatccgtgaaacaatgataagtataaaatcttttatattcataaacctccaaagaagtatttgcagacattattaaactcctcaggatttatccttgcaatttcacaagctgtctcataaggcctaacaatatcctcaacaagataataaaaaagatcaaagtcacccatactgtttaatttctcatacattatggggtttctttcacgcaagtaccgtgatgtgtaaatagatcttgatgcttcagcaccaattcccaaaacaccaccagcagcagaaccagaaaaaaaagcaccaaccccctgagatataatcacccttccgaggttaacacccgtaagctgggagaacattactttacctataacacttccagatatattttttgaaaaatgtgcgactttacccatatctacataagaaacaaaatcatctataaatggcttaataattttataaatagtttcatcgttaaaggttacttttttaaccagtgcagctaaccgaaatttatcatcctgattctctctgcggtattcagtgtctataaaatcatagccaagataggcaaggctgacgggtaaggaaataacgccttttgccacggcaccgataaacccggacccatcgatatgaatagcctcaagcatatctctggcaatatcttttgcactgtccataattgttaccctttagataagcctgttaataaaactccagccctatgccctcttcctcgctccaccccagagtcaggaagtgtggtttctgcttcgccgccatatgcgtcagcagttgctgactcagcaccggcagaatctgctgattgagcaggcaggcggcggtcagcgcgtcatgcaggccgtttcatcatccggttcgtccactttgaccatctggaagcggcgctccagtgcggcatctcgttcaaaatattgcttatattcgctccaggtggtggccgcgatggtgcgcagttcgccacgcgccagagccggtttcagcagattggccgcatccgccccgccggcctggttgccggcaccgataatggtgtgggcttcgtcgataaacagcggaaccggtaccagtgacttctgtacggcatcgatgacgtttttcaggcgctgctcgaactccccctttacaccagtccccgcctgaagcaggcccaggtcgagagtacgtagaactacaggcttgagggattccggtacgttgccttcggcaatacgcagcgccagcccttccaccagggcggtcttccccacgcccggctcaccgaccaggatcgggttgttcttgcggcggcgcgagagaatgtccaccatctggcggatttccgtatcgcgcccaaagaccggatcaatcttgccctctttcgctttggcggtgacatcaatggtaaatttatccagtgcgttctgcagggccggagtcagctcgccttcttttatccccgcgccgacctgactgccgacaaattccacttcaccaccgtgattttgtgccagttcggcttcctgctgcacttccgggcgctcatctgactgtgcatccagcaacgggcgaagacgctcaagttggccctgcccgagggtcagcagcggccacagtccatcgcagtgtgccagtttaggtttatcgaccagcgccatcagcaggtgaatgctgcggatgtgctcttcacccgccagcgaggcatgcagccaggcgtcctgcatcagggtctgaatactgtctgagagctgcggacggctgcgcaccgaacggggcagcgtgtcgagaaatgccagcaaatcctgccagatggcgtccatatcccattcgtagcgccgtgccagcaccgtcaggtccccctctcccagctccagcagcttcagcagccagtgctcaggcaggatttccgcgtgagcgcgggtctggcagagcgaagctgccacttccatcgcacgggcacagtaagggttcagacgtcgcaacaggctggctggattttccatgaatctctctctttgtcagttcctggacacgctaccgcccctcgctgttcaccaaagcgcataaggtcaggcagacagattgtatttttctttgctgagtgcccgcatatcaggctctcagcaaaaaactgtggacaggaaaccccgcccgcatcaggcgattgccctaaataattcgtgttgcaggcaggcggcaagttcgtgaatccccgggagcatagataactatgcaaccggggtgagcggatgtagccaacgcacctgcggcgcgaagtatgacgggcaattacgcggtggcgcgttcgttccagctatcggaatgaatgatgttgccgtctttgtaggtccaggtgattttttcgtaacgcagttctacgcgctcaagatggttgtgcttctctttagaaggatccttgatgtcgtacatttcagggctcactttcaccaccttcacgttttcgagtttggtgttgaagtactccacttcctggcccgcgtcgttgatcttgtaccacttgaattccgcagacttgagggtctgaccggtggtcaccgccctgtacagatacgggctggacgagtcgatttccttggtgaacaggaacggcgtgtggatacgggtgccggtcagtttgccggtgttgttatcggtcgggatgtacaggttatgctcctgagcgacaacttcgatgctgccctcgcgatcctgaacgtccacagatcctttaatgtccgcaccgccgtcgtctttcagccaaagataaacaggaattgccatggaattactctccattgtgttgtgatgcgccatcatcctgcgatgacgccgggtatttgccgggtatctgacaggcattggcctgcggtaccagactgatttcgacacggcggtngagcgtacgcccttccggagtgtcgttggttgcgacaggacggctttcgccatagccctgcactgcaaaacagctttccggcacgtcgccggtgtcgcgcatccagtcgcgcacggactccgcacgtttcagggagagcacctggttagactggtcatcccccgtgctgtcggtatggcccgccaccacaatcagccagccgggcttcgccttaatccccaccagagagttcaccagcagctttgtcgagccaggtttcagcgcccattttccggtgtcgaacagcgacatgctgtcgagacgaagggttttcggaccctgaatgattttcttaatgaccggaggcggcggtggcggaggtgcccagtcactgactgcggcctcaacgggcggaatcagtcgcagtccctgatacagacccaggcgataacgcagtggctccccgcgacgttgccagtcgtccagcaatgcgccatcggcccgcaggcgctgctgcgcacgaagtttcggggcaacaggctgccccttcagctggtgatataacgcaaggtgatcgctaacattacgaatgaggcgctggttgttcatccaggacgccagcatagccagcgcgagaaaaatcccgcccagtaatccggcataacgccagaacaccatcctgcggctcacgccacgtcggcgcggcaacgccggcagcagcagttcaggcagcggcagtggctctgtgctcacaacggcatccggtggcagcgccgtcatcgaagtgatgtgctgttgccagagattgcctgcgataccactcaccggcaccatgcacataccctgcacgcagggcgtcatcaccggtaactcccctcgccgtaccgacagcaggtcattcaccgcgctgttttgccaggcaagcagactgtccagccacaggccatggctcagacgcgaaagacgcccgtccgttccgatttcctgggtccaatccgtcagtgacacattgccctgaccggactgatacacctgaataccgcttcgcgggcttaccgtggtaaaccagacgggctcagcctccgcacagaccacaggaggagatacccaggtcacggtccacagcggggggatagtgccaaatgccgcacggcaccggacaacagcacgctgccagcccctcagggactgggtaaaatcatccccgaaggtatgctgctcaggtaccaccgccagcatgacggagatttgcgacaccagagccggacgcaccaggctcagatgctgtgccaggagtggcagctgttccgcatcctttacccacagataccagccctgccgggtttcccggtgacaggagccggacacaaacagcgggctgttgtcgccgcagacgaggatcaccgccccctgaaaatcttccggcggcaggttttcatccactatttcccggatagcggtcgcacgtgcctgcgaagcccggcgctgacgccagaacatcaccccggagaccagaacgaccagcaggctgagtgccacacggctgcccgtggacagtggccagaatcccagaatgagccacagcgccagtacggcacccaggacagttaacagacttcggtacgcatcccgcatcgcttaccccggcctgacggtctggcttaccagcccggtaagcgaagacgagaggaagaaccagagcgcggccagggcgacaacggccacaacccaggtcagccagtacccgcgacgaccgctgcgcaggcgtgatgcccgggccacaatcggggcgtcctgtgccagcgtgaaggccggcacccgttctgcaagcgcgcgaacagtatcttcccgacgctcatcatcctgggcgcgatactgacccacaaaccccagctgcagggtccggtacatacaggtcaggacggcggcgtcaggggtagtatctttcagcagatctcggatcctttcccacagctcctcaccggcattgagggtaccaaagaagtgtgcctgtagcgggtcacggtgccaggtcagatagccatcatcggttgtaccccggttcatcacgctctcatcaagcagtgcacacagggcatacaccatatggtcacggctgatgtcgctgtaaccggcttctgtgagcgcagccttcgcctcctgcaccagacggcaggcccgacgatagagcccttccccgtcacggacctcctgtccgccccgcagctggctggccatcagccagcccgggtagaaaatacgctcaatttgactcatttctgatgtattcatgtgcgcagcaccgcaaagagttcaagtttcacatcccccagtgagcgcggggtatagaaggtgcaacttcccgcttccagcatcgcccgcgccgcctcactactcagatccagcgagaaatactggttctcaagacgtaacgggatagcggccggcacatgggtcagcggcttgataaccatcccgctcagggccacattcaccacatccgaaacatcatcaaagctgcccgctttacacagctgcgggaatttcgtctgaagttcataattcggcatggaggagcgtacggaaaggtagaagtccgccccttcgcgcaggcgcgcatcgtgcagggcacctttccagatctggtcctggtgctccaggtggatactcaccacccgtgacggcaggctcgcttccagcagcttatcgagcagtgccagcagcggcggaaatacccgttccggtgcatcgtgctggtaagcaggaagatcgccggcgtcgtgttccagagagaaggtgagcaggctgccggccagacgggacaattcgcggtacaacagttccggatgacgatccggtgtctgcagcagttccgtcagcaccggctcggcgctgttcagggcattaagcagccagaacagggagacatccgcgaccgcaaagtctgccatccgctcattgctctcacgacgcatggccatcaggcgacggcggcgggcctgcagacggaccagcaggtcacccagttcggtggcaagccacggactggcagcaacagacagcattggcgggataaaggacgggtcccggctccactgcccctgcgcattacgcaccagacgagcgaccggacaggtcaggtatgccgtgttttcctggctggacagacgcagggtcagcgcatgacgcaagatcgcgagttccccgctttcatggccggccagttcctgcaccaccacacgctcagctttccagcgacgcgggcgctcgctgtcttgtccgttatcaaggttgccaccactggcgctcagcagcggcaatgcggcaaccacctcaacagcctcagagccgtttgcggcatacaaatcacagaccggcggaatattatccgccagatccgtatcaaccatcgtgccatcctggaaacgtacgaccagacggatggcattcaggcgcgcgagcgccagtgcagcatcatcaaattctgccgcaaccacgcccaggggatgagaaaaccccatccgggcgaccatgtcggcaacgtattcactccagcgggcctgctgctggaattgttgcggggccagagcggccccatcctcccaaagtgggcggtaaattttcatccctgatttcccctcgccttacgatttggctttcggcatctgggaaaccagtgacaggttgacgtccatgccttccacctggaagtgcgggatagcgtacagcttcacgcggaagaagcccggattgtcttcgatgtcttccaccaccacttttgcgtcgcgcagtgggtgtgaggcctgcagctcgtcgcccggatcggtcatttcggtcaccagactgcgcacccaggtgttgagttccagctccagcaggcggcggtccttggtggaaccgatgttctcgcgctgaatcagcttcagatagtgggcgatgcgcgacagcaggaagatatacggcagacgggcgttaatgcggctgttggccgtcgcatcggcggtgtcgtacagcgccggtttctgggtggagttcgccgagaagaagcacgcatagtcgcggttcttgtagtacgacaggggaatgaagccgaggctggcaaattcaaattcgcgggtttccgggatcatcacttctgacggaatcttcacctgtttgccggtgccgaggtcatacagatggattggcaggtcctggacggcaccaccggcctgcgggccacggatttgcacgcaccagccgttgttgatgaagctcttcaccatgttggccgcaaaggcgaacgaggcgttggtccacaggtatttatcgtgatccgggcctttcacttcttcaacgtagttgaaactgcgcaccggtacggtatccgggccatacggcaggcgtcccagcacgcgcggcatcaccagaccgagatagcgggaatcgtccgtctcgcggaaggatttccatttgatgtactcggcgcggtcgaagtaattaccgatgtccttgatagcggcaacctgctccatgttctcttttaaaaagaacgccgggcctgcagagccaatgaacggcatgtgggctgccgcagacacttttgaaatattgcgcatcagcgccacgtcctgcgcggacgcatcaaactcgtacgctgaaatcaccgcagcaatcggctcgccacccggcgtgtcgtattccatcgtgtatgtctggcggtacaggccactctggataatttccggcgagtcctcgaaatcctgacgcagttcatctttggacaggtcaagaatctcgatttttacgttctgacgaaaatcagtcttatcaaccagcgatttcaggccgcgccagacggattctgtcttctggaattcatcgctgtgcatcactttatcaagctggcggctaatctggaaatccagttctgcgatgtggtgatccagtaatgttttatcgagtttctcaactttctggccagacttctgtaggcactgcatgaagacctgaacggcggcagtaacgcgcgcatcagcagatgtttccgccatcacggtattatcttcaaaaccattcaggtcaccaatttcagcaaccggtgttaaattaattttattgaacagggaagcataaacaccattctgtggcagcgtcttttcaattgtcgcaccgcctgtataattctgggattcattattgactgacataagcattttactcgtgattattccgttaacgggttccggtaattatccctgtaccggggcaagcgcattcagttcgcggcgaagttcatcagtaagtgccgggtcctttaaaatagtttccagttctttcctgaaagtgacattatccagaagattggatttcaaatcacgcagtaaattacgcatagcgagcatcgcacggagctgaggtatttgacgtgccaccgcctctggctcaaaatccttcatattctgaaaaagcagcttcacgttttcttcggagccatcgtttgccagggtatttttaacggtgatatttacttcgggatggagatcagcgagaacgctgttgaagttatttttattgatgttgattttttcgcgctctgaaagggtcccctccgccctgccattgctgtaatcgccgacagtcagcagcttcagcggcagttcaactttcttcctggcaccgcccgtgaccagatccagttttatatttacgcgcgcgcggggtatctcgttctgaaatgattcagacatggttatttatctcctgaataaattaatcccttgttggattgagtatcaccatataaatacaggggcttttattttaaccagtgatttgcgttaaggtaaagcggataatatagggaatttaacttcagtgaaatgtactaacatttaattcaggcttaactaccgcaccctgactggctttgagtgctaaagagccaggctgtccgcttaatttaaaatgaaaaccccgaccaattaagcatttcacgggaatgttacaggatagtgcttaatactgaaaagccctaaaactgtccaatactggacatatcattaaaattcgggataaccagagataccatttattcttttcggcgcatcggatataagataatcatccactggatgcatggaagatgtagtacctacaaaaccccgttcacttcgtttgacgaggtcactctgtatgacgacagaaaaattatctcctggctggaatgtggcaagcttctgcagtttttgcccagccatatcgggtttgtgcctggacgaagtgcataagtcattcggcgaatgaatgacaacacggcgttttttctctccagataaggagataatctgtttgacggcgggtactgggcgatagccttcatccagcatatataccggacatttgtctttgcgttaagttgttcacggcgcagtacattacgctcagcccgaccctgcttgtcggatttactaacctcttcacccgccggtttcacaaccttcgacgcgcttgttgttctccttgttttgacgccaggtaatgtaatatccatcattattcaccgattaaatcggtaaccccttaagaacccgcactctcacagagtttgcgggttttttaatgtcatatttccaccctgttctaagcgaaacgctaccgcgactctgattgtaaatcccggaaaaacttctattatttgactgtacacgtcatttttctgaaggatttacatgagagttaatggacttacgaaaggatttttcatcctgatcgtgctgatcgtcacccttgcttttttcgacgttctctccccctattattcagccattttatgggcggccattctggcggtgatcttccacccggtgaagaacaagctgcgcgatcggctcggcgagcgtaacggcctggcggcgtttctgacgatagtgattatctgtctgatcgtgtttaccccgctggcgatcattctctcgtcgctggccttcgagctcaacgtggtttacaccaaactgcagcataacgatacccagttcccgaccgtggtagccagcctgtttgctcacctgccggaatgggcaaggagcttcctctcagagcataatcttgatagcgcggaacagattcagcggcagctttcggacgttgcgcttaaaggaggccagtacctggccggtagcgcattcctgattggtaaaggcacgttcggttttaccatcagcttcggcatcatgctttatctgctgtttttcctgctaaaagatggtccttacctggtcaggctgattctggaatccctgccgctatcaaatcacgtgaagcagcatcttttcgccaaatttgccgccgtcgccagggcgacggtcaaaggcaccgtggcggtcgcgctcgcccagggcgcgcttgggggactggcgttctggatcgtgggcattgatggcagcatcctgtggggcgcgctgatggcgtttctgtcgctgatcccggcggtgggctcggcgattatctgggttcctgcggcgatctatctcttcgcgaccggtcagctctggcagggcgcgtttatcgtcggtttctttgtgatcatcgtaggcctggttgataatattctgcgacctttactggtgggtaaagataccaaaatgccggactacctgatcctgatcaccacgatcggcggaatggaaatctacggcatcaacggctttgttatcggcccgctgatcgccgccctgtttatcgcctgctggaacctgctgtccggacgcgatcacgccggaaacatcgatgagcttgatgaggatttcttagaagagggtaaaaatcacgaggagtagcgggcggtattgcacaacatcgcggggacagcgaggtcagggggaatgccccttgctcaaccgcgatgaaatcccctccccccgcgcccataagcagcatttataactggtatttgtgaaaattttggtaaacgccactgcctatcaacgtaacaaatgctaacattatgctgtttatgattgataacaaaggattacccacgtgaaaaaaatcactacgtttgctgcctccctgctggccgttgcctgcatgtccaccagcgccgctgcagctgagcagccgctggagaagatcgccccgtttccaaaggcggaacaagggatgaagcgtcaggtgattcagctgccgcagcagcaggatgaatccgcattaaaagtcgagctgatgattggccagacgctggaagtcgactgcaatcgccaccgccttggcggccagctggaaagcaaaaccctggaaggctggggctacgactactacgtatttgataaagtgacgtcgcccgtctcaaccatgatggcctgcccggatggtaaaaaagagaagcagtttgtgatggcaggcctgggcgatgcgggcatgctgcgctataacagcaagctgcccatcgtggtttataccccggcgaatatcgacgtgaaatatcgtatctggagagcggacgaaaccatcggcgtagcggttgagcgttaatgcctgaagagtgaatccggcggcctgcgccgccggagaagcgcttacagcgcgatgtcagcgataggtttcccttccggcagcggcttcagcgtcgcctgcggaacgttatcagcctcggtaagcggctcatagcgcagttccagcacttcgctggtccacgccagcgccttttcaatttccgctgcgttgccatccagacgcgtaccgtagctcgggataatcgctttcagtttcgcctgccactccgctgagttgatcttctctttgaacactttctccatcagctgcagcatgattggcgccgcggtggaagcacccggcgaggcgcccaacagcgcggctaccgtgccttcatcatcgctgacgacttcggttcccaggcgcagaacgccgcccttcttcgcgtcgcgcttgataatctgcacgcgctggccggcctgccataagcgccagtcttctttgcgcgcttccggatagtactcgcacagcgccgcgtgacgatctttgtccttttgcagcacctggctaatcaggtattttaccagatcgaagttatccagcccgacgttgagcatcggcatgatattcgacgtgttggtggaggccagcagatcccaaagcgaaccgtttttcaggaagcgggttgagaaggtcgcgaacggcccaaacagcaccacgcgtttgccgtcgataatacgggtgtcgatgtgcggaaccgacatcggcggcgcgcccacttccgcctgaccgtagactttagccagatggtgagtcaccacttccgggttctcacaaaccaggaactgaccgccgaccggaaagcccgcgtactccttcgcctgcggaataccggtttcctgcagcagggtcagcgcggcgccgccggcgccaataaagataaatttagccctgataacccgtttctggtggcgattgttcgcatccgccagcgttacgctccagctcttgtcggcgttgcgcttaaagcgacggaccacggtacccagctgaagcgagaaattatcatgggattgcagtccggcgatcagctgacgggtaatttcaccgtagttcacgtcggtgccgacttccgagcgggtcgcggccaccttctgctgcggatcgcgcccttccatcaccagcggagcccactctttaatttgttgatgatcttcagagtagcggatgccgcggaacagctcgctttgttgtaacgccgcatagcgggcgcgcaggaagttcacgttgtcttcgccccacacgaagctcatgtgcggcacgctgttaataaaggatttaggctttttcagaatgccccgggtcacctggtgggcccaaaactgacgagaaatctggaaagattcgttgatatcaaccgctttatcgatattgataccgttagcggtttgcggcgtatagttcaattccatcagcgccgcgtggccggtgcccgcgttgttccatccgttcgagctctcttccgcgacgctggacatctgctcgaccatggtaatagaccagtccggctccagttcctgcagccaggttcccaacgtggcgctcatgatgccgccgccaatcaacaatacatccgtctcttgctcatggcgggtgttggtccgagtgttattggaaccaaccgcctgtgagctgggtacggccatctttttcttcatcggatttgagccttactttactcgcttttttatttagcgcaggtgaaacgattctcggcttcaaaggtaacactgaagaaaaaaatttaaatattgtttaaattttaagttgagttttgagatctgttataaaaatgtttaataaatgtgtatcacaaatcacattttgtactggtgtcagcgatgtatccgcgctattatcctcggttttgtgaccgaccgcacgtaagcagcgaccgatcccggccaaaattttttaaattctgcgaactttttttatgcccccagtttccgattccgctacctctggtcacgctggcgcattaggccagatactgcgctcgcccgcgctgctgacgcgtgaaacgctggcaggcgtgctcaccgcgctggccctgatccccgaagtcatctccttctccgtcatcgctggcgttgacccgaaagttagcctgattgcctccgtggtactgtgcctggcgatgtcggtcctcggcggccggccggcgatggtcaccgcggccgccggctcggtggcgctggttatcgggcccatggtgcaccaatacggcgtcggctacattctgccggcggtcgtgctggcaggcgttattcaaattttgtttggcctatgcggcatggcgcgcctgatgcgctttatcccgcagccggtgatgaccggttttgttaacgcgctgggtattctcatcttttttgctcaggtaccgcatttctggagcaagcagccgctgattatcggcctgttcgtattgacgctgctgattgtcctgtgggcgccgcgctttattaaagcgatcccttctccgctgattgctatcgttctgctgacgctgtttaccgttttcagcggccagctgctgccgaccgtcggcgacgaaggctccatgagcggcggactgccggggttaaccagcctgatggtgcccctcgacttaaccacgctgcgcatcatctggccctgcgcgctgagcatcgcttttgtcggcctgatggagtcgcttctgacggcgaagctggtagacgatttgacccacaccccttccagtaaggcgcgcgagagcgccggtctgggcgtcgccaacattctcgccgggttttacggcggcatcgccgggtgtgcgatgatcggtcagaccatcgttaacgttgaaatgggcaaagcgcgcagccgtgtctcgaccgttgccgcaggcctggtactgctattgctggtaaccgcgttaagcgaagtgatggcgagaatcccgatggccgtgctcgccggcgtgatggtgatagtggcggtaaaaacctttagctggcacagcattcgtccggcggagctggcgcgcaatccgtggccggaaacgctggtgatgctggtgaccgtcggcgcgaccgtcggtaccagcaatctggcaatcggcgttctggcaggcctgctctcaatggccctgatccctcgccgtctgcgcactcaagcgcaggctacatcagaaaaagcgtcgccagcccaagaaaaataaagaatcccccggtgtcggtaatagcggtaatcatcacgctggagccgaccgccgggtcgcgtcccagcttgaccatcaccatcgggataatcacccccatcatcgccgccatcaacaggttgagcatcatcgccagcgtcattacgccgcccagctgcggatcgtcgtacagccaccaggtgatcgcccccataatcccgccccagacgatcccattgatcagcgcgacgcccatctcacgcaggatcaggaacgaaaagcttcccggctgaatatgctgtaacgccatcgcccgcacgatcatggtgatcgtctggttaccggtgttaccgccgattccggcgacaatcggcatcagcgaggccagcgccaccagttgcgaaatggtgtgctcgaaaccatcgataacgcgggaggcgataaaggcggtgcacagattgaccgccagccaggcccagcgggtcttcaccgctttgctcaccggggcaaacacatcgtcatcgttgctcaggccgcccatccggcgtagatcgttatccgtctcctcgtagaccacgtcaacgatctcatcgatggttaagcgccccatcagcttgccgtcggcatcaatcaccgccgcgctgagtaagtcatcacgttcaaaggtacgcgcgactttttccgcgtcctcgtgcggctggaaggtcaccggatcgccttccatcacttcccccacccgcttctgcgcatcgttaagcagaatggtttgcagctcgagttcgccgagcagcagcttattgcgggtggtcacaaacagtttgtcggtgttctccggcattttccctagtcgccgcagatagcgctgtaccgccgcgagagtggcttccggacgaacggtaatgacttcaaactccatgatcgcgccgacggtattgtcggcgtagcgcatcatctggcgaatacgcgcgcgcttatccgcgggcagcgtggccagcaaacgtccggtcagatcgcgcggcaggtgctgcagcaggtagacctgttcatcaatatcgagattttgcagcgcgaacagcaggtcgtgatcgctcatctcctcgatgaggtcgccccagacgctttccgatgcctccagcagcacttcaccgcgcttatcatcagcgaccagccgccagagcgcgttgcgcgcatcgtaaggcagcgcttcgagcgcatcggcaaggtccggaggcggcaggtgggaaaccagcatctccacttccgccagatcgtcggcaagcgtgctgtcatcgtaacgttcagcgagggttaatttacccagcagcgaggatgtgacggctttatcggtgctcaggagccaaatgaggcgggcgcgctcttcgtcacgcaatctggcgctttttttatgcaaaacggacatcggtcaggcaatccttgtaaaaatatctgtcagaccagcaggccggaagccttaagcatagcgcgaggaggcggaaataataaccgctatgaattcagtcgacggaaaaaacagcagcctgcgggaagcccggaggtcggctggcgcctccgggacggcgtaaagcgatcaggcggtacgggcgaccgcgtcgcgggtcgccagctcgcgctcatttccggtcagctcagaaagctgaccgccgcgcatttccagcagcctgtcggcgtgctgaaagtagtgatcgtcatggcttatagcaaagagggttttacccatctccttcatcagcggcagcagcacctgatagaactcacggcggaaatgggggtcctgatccgccgcccattcatccagcatgatgatatctctatcttccgctaacgccagcagcagcgccacgcgctttttctgcccttttgacagcttcaggtcgaggattttgccatcgtcgagccgtagcttatggttcatctgcagataacccagccacttctccaccagcgtcgggtcagccgccttcccttccggccccagcagtctgtcaaacagccagacgtcggtaaacaccgccgagaacagcttgcggtaatcttccggcttatccgccgccatcggctgcccgtcaaccaggatctgcccggaaaggggctgatacaaaccggtcaacagcatagccagcgtcgatttcccgctaccgttaccgccgatgagaaagaccagttcgccgcgcttgagggtcatgttgatcggcccgaccgcaaagctgttgtcaggataatggaaggtgatgtcgcgcagctcgagcgtctgccagtggggatgcgcctgcggctgcgggaactcagcgcggtacggcgcgagcgaaaacttattcagcttgttgaatgccacctgcgcgctgagcagagtgggcagcgcgcctaccgccgagagcagcggcgtgcgcaggaataatagggtcaacgagtaggtcgccgccaccgccgtatcggcccagcccaggctgttggccatccagaagaccaggccaatcgcgcccagcatcataatattcgaccagttgaccgcgctcagatgaaaggtatcggcgcgaacaatatggtgccggtattcgcgcgcgtccggcagatagagctgagtaaacacatattcggcgcgctcgcggttgagagtgagctctttgcgaccttcgagcaccgtctggtagtcgtgatacagcttatcttcgctttcgcgcagcgacgccatatgcttataaacccgcgataccagcataaatccgccccagatggtcaacgccagccacagggcggtaaccagcatcatttttcctgacagccaggccagataagcggcggagccaaaggtcagaataatcccctgtaccagctccggcaggcgcacgaaggcaatggtgatattgcggatatcgctggttagcccggccagcagcgacgcgctgccgattttctcgatcttctcgatttgcgtatcaaggatgcgctttataaattcgccgcgcaggcggtaaacgaaatggtggccgagcgtggtcagcgccagctgcgagccgagggtgaccgccatcaacagcaataacagcccgagaaactccggcaggaccgtcagggaggtatcgacaagggttatcaggcgcaggttaatgaaggcgataagcccaatacccagcgccgcgctcagcaggctcagggcaatgacggagataaacggccagcgatactggcgccagacaagaagaagaagttccataacgcgtaatccgggcaagcaaaaacagccagcagtttaaactgctcgacgatgacagcaagaataattcttatttttattctttattacccgccaggcggaaagtgagattgtaacgacagccgccggtagccggatggatgccctctttcagcggttgaataccgtggtaaaacagccgcgattcgccgccccagaccaccacgtcgccgtgctccagcagcacccgccgcagcggatcgttacgccgcaggccgccaaactgaaatatcgccggaagccccagagagacggaaacaatcggcgctcgcaggttttgctcgtctttatcctgatgcagcgacagcttcgttcccggctgatagcggttgataagacacgcatccggggtaaagcgcgcatagccgctcgccgccgccgcttctgcggccagttcgcggaaaagcgacggcatctgcggccagcgcttgcccgtcagcggatcgtcggcagcataaagatagccgtgctggttggtggtccagcccagctcgccgcagttggtcatcgccaccgacatggtatagccgccgggggtgaccatctggcgaaaaggcgaacggcaggcaatctcgctgattgcctgcaaaagcgccggcgcgcgctctcgggcgtagcggcgcaaaattatcgcccccggagccagcggctcctgccagggcggcgtatcggcaaaaagatcgagcattatttctcctcggatgacgcttctcgcgccagcagcagcgccttgcgcgccgtaccccaacgatagccggatagcgccccatcctcgcgaacgacccgatgacagggaataaccagcgccagtttattcgcagcgcaggcgcttgccaccgccctcaccgcgcgggggcggccaatactttgcgcgacctggcgatagctgcgggtctcccccgccgggatctgacgcagcgcctgccagacctgaagctgaaacgccgtgccgcgcagatccaacggcagggaaaacggctgccggtggtcatcaagatgggaaaatacctgcgccacccgctgacgaaaaatctcgtcgcccggatgcagccgcgcattggggaacaggctggctaattccgcatagagcaaggcgtcgtcctctccgggcagcacggcgcacacgccccgctcactctcagccaccagacagcgccccagcggaccgtcaccgcatacccaggtaatatcaatatcccccccgccgcggcgaaactggcggccggtcattcccagcgcggcgtcagcctgctggtagtagctgctactatccggaaaaccggcagagagcgccgcatcggtaattttctccccctgccccagcgcttcgcgtaaacggcgagctcgccacgcctgttgccaggctttaggggtcattccggtgacggatttaaagaggcggtgaaaatgaaaggggctgaccgcaagctggcgtgccagcgcttccagcgttaacggcgtctcctgctccagcagacggcacgcggcagccactttctctaccttctgctgctgcggatcggttttttccggctggcagcgtttgcacggacgaaagccttccgcctgcgcggttgccacatcaggataaaagcgaacattttcccgcagcgcgcggcgcgagcggcaggaggggcggcagcagacgccggtggtcagcacggcaaagacaaactgaccatcagcgctggcatcgcgttcgcataccgcctgccagcggcgctcatcggtatcaatcattatcgttttcatcacggactcctgctgtaagtgtatcttcagtgtgggccgaagtccgtcatcaaaaacccgaaatcttgcgctttaatttttctcgccaacgaggaaagtgcggaactgcggcgacatccaggttttaaacccgtccccctctttgataatcatatagaccgccagcccctgttcgcgtactacgtcacgcgcattttccggccccagcaccatcagcccggtatcccagccgtcggcctccagcgccgttggggcgataacggtcaccgaaaccagtttatgatcgataggccgcccggtttgcggatcgataacgtgcgagatgcgcttaccgtccagctcatagtagttgcgatagctgccggaggtgctgatgccgtggccgttgatatcaacgatcgcctgtaccgcgttttcgcgatcggttggcttctggatcgccacccgccacggctgcccttccgcattcattccccggctcgccagcgcgccgcccaccgagaccaggtagcgcgagatcccctcctgctccatcaggcgcgccagatgatccgcggcgtagccttcacccacggtagagagatcgacaaacagatccggaatatctttttgcagaaactgcttgccggcctggttgatcaccgtcagatgctgtaatccgctgcgcgctttcgccgcggcaatctgctgcgcatccggcgttttgaccggctgtttatccgggccaaagccccataaattgaccagcggcccgacggtgatatccatggcgccatgggtttttgcgccaatgcgcagcgacatcgtcacgatatccgccatcgcctcgctgaccggccacggcgaggtgcccggcgaatggttaaagcgcatcaacgctgaatcgttcttccaggtggaaagcagacgatcgtcggcatccagctgagcctgaactttctggcgcagcgcctcggccttcgactcatcaacgttgatgacgctaacccgccagaatgtgcccatggttttaccctccagcacggtggcggcggattttggcgtctggggagtggtggctgaatcacagcctgaaagtaatacgcaggcgccgaacagggcggcgcggaaaaaagtgatatccataaaattggcttcctctggctaaggcgcaaagagtacaccagcaaggttaaaccgggcataaaaaaaggcgccatcggcgccttttttcaaacttcagcgtgcttagaactggtaaaccaggcccagtgcaacgatgtcgtcggtagagataccggcacgacgggtaaactcgttgtcgtccagcaggttgattttgtagtcaacgtaggtggacatgtttttgttgaagtagtaggtcgcgcctacatcaacatatttcagcagatcctgatcgccgaaaccttcgatgtctttacctttggactgcaggtaagccacggacggacgcagaccgaagtcgaactggtactgagcaaccacttcgaagttctgcgctttgttagcaaaaccgctgatggagtcagaatcaccgctaccgctgaaacgagtagcattataggtctgggtgtactgagtcgccaggtagatgttgttggcgtcatatttcaggccaccggtgtaggtttcagcgttgtcaccacgacctttggacaggttattctgatcgccattacgtttggagtgagagtacgcgaaaccagcgctgataccgtcgtagatatcataggtcagagaggtgccgtaaccgtcgccgttctgtttcagagcgccacgaccgttgttggtcggggaagtaccttcgccgcttacgctgccgtttttaccctgatactgcagagcaaagttcaggccgtcaaccagaccgaagaagtcagagttacggtaggttgccacgccgttagcgcgagactgcaggaagttgtcagaaccgtaggtgtcgccgccgaattccggcagaacgtcagtccaggaagttacgtcgtagacaacgccgtagttacgaccgtagtcgaaagaacccgcgtcgccgaatttcagaccagcaaatgccagacgagtccacgcctgatcgctggagctctcggtgttgttagcctgaacgttgtattcccactggccgtaaccggtcagctggtcgttgatctgagtttcgcctttgatgcccagacgcatgtaggtctggtcgccatcggaagatttgtcgtcagagaaatagtgcagaccgtcgattttaccgtacagatctaatttgttgccatctttgttatagacttcagccgcattcgctgcgcctgctaccagcagtgccggtaccaggagggacagtactttaactttcatgttattaaccctctgtttgttatatgccttttattattgccactgcttactgattacccttctaatcagtcggctatttcattgtgctgcaaaacgaggaataatccaacaagaatatgatactaaaacttctaagatgtttcaaaatacccacaagatgtttcaatttgtaaatatgagggaactttttttcggtcctaaatgggtagtgaaataagcactaataatcaaaaaataaaaatttttaatccctgtcaatgagttacacggttacatatctatagcactgaatggtaaaacaaaattctcgtctgcgactaaaattaccctcgctatcatcattaactttatttattaccgtcattcagttctgaatgtctgtttacccctatttcaaccggatgcctcgcatccggttttttttacccttctttacacatctttaattattctatgctaccggcgaaaaaaataacggttattaatcaaacagcttgcgaataaactcaaggctgtttatataatttcttgttatttagtgctatttccgttagtcaatccgtaaataattgtacaaaatcactcgggccgtacatctttgctcgccgcgcgggtttgggataaatctcaaggcaaaaaagtcgttgtatagtattcagatgtatggattttggacgttaacctttatactgttcatagcatctgcgctgcccccggttaacttggtgcaacagtccgtttacacatactgatgagtcgtactctcacacgatgaccccgaaaaaattttccctgatacccggcaacattacccgcttctttattctcatggtcatcgtcctgctggcgacgatgggggtcatgatccaaagcgccgttaacacctggctaaaagataaaagctaccaggttgtcgatgtcagctacgacttacataaacgcattgatacctggcgctacgccacctggcaaatctatgacaacattgccgcgacctcgtccagttcagccgcagaaacagggttacaagagacgcgtttaaagcaggacgtttactaccttgagaaaccccggcgcaaaactgaagcgctgatttttggctcccatgacagctcaacgctggaaatgacgcaaaaaatctccaactatctcgatatcctgtggggcgccgagactattccctggtcgatgtattaccttaacggcctggataacagcctgattctggtttcaacgctgccgttaaaagatctctcctccagcttcaaagagtcgaccatcagcagcgtcgttgaatcacgacgggcagaaatgctgctgcaggccaacacgttagatgaacgcgagacgttttcgtcgctgcgccacctcgcctggcaaaacggctactactttacgttacgcaccacctttaaccagcccggccacctggcgaccgttgtggccttcgatctgcccattaacgatctcatccctcccagtatgtcgctggagagtttccgcctggagcccgatccgtcgcagaacgtcagcgccaatccggataaagaaaccgccgacatcgtcagcattaactttaacggcccgcagattgaaattatcaccacgattaataccaccggtatgcgcctggtctggatggtgccctttagcgagctgattctggagtccttgcagagtattttactgccgctgctgctgaacattggcctgctggcgctggcgctgttcggatttaccaccttccgtcactacagcggccgcaaaagcatcgtggggacggccgtttcctcggccgccaatagtgaattacgcgcccagcgcgccattcacgaagagatagtttctctgctgccgctggggctgctggtgcacgatcaggaagctaaccggacggtgatcagcaatccgattgccgatcatctgctgccgcatctgaatctgcaaaacatcatcaacatggccgatcagcaccagggcgtgattcaggcgacggtgaacaatgaactgtatgaaatccgtcagttccgcagccaggtgtcgccgcgcacgcaaatctttattattcgcgatcaggaccgcgaggtgctggtgaataagaaactcaagcaggcccagcgcctgtatgagaaaaaccagcagggccgtacggcgtttatgcagcatatcggcacggcgctgaaacagccggcgcaaacgctggcggaagaagctgctgtgctcggcatggccgaaagccgcaggctggcccagcatgccgatgaactggtacagctggttgatgaaatagagctggcaaacctgctggagagcgatagctggaagagcgttcaggacctgttctcaattcaggaattgatcgatgaagtggtacctgaagtcctgcccatcatcaaacgtaaaggtctgcagctgctgattaacaactcgctaccggccaatgagcagcgctacggcgatcgcgacgccctgcgccgcacccttttactgctgattcagtactcggtgaccaccacgcctattggcaaaataaccctggaagtcagtaaagatgaatccgcggacgatcgtctgaccttccgtattctggataccggcaacggggtttcggcgaacgaaatcgacaatatgcactttccattcctcaacgatacgcaggcagacctttacggcaaagccaacgccctcaccttctggctctgcgatcgcctgacgcgcaagctcggcggacagctcaatatcaaagcgcgcgaatcgctgggtacccgctactccctgcatctaaaaatggccgccagcgcggaggagagtgattcgggtgaacatctgctggatgaagtggtgatcatgcttgatgtgaccgccaatgaagtccgccgtatcgtgacccgtcagctggagagctggggagctacctgcatcactccggatgacagaatcacaagtcaacaatatgatctctttttaacggataatccgtctaatcttactgcttcgggcttgcttttaagcgatgatgaagcccgggttcataagattggtcctggtcagctccgcgtaaactttaatatcagcgctgcgctgcaggaagctatcctgcaattgattgagcagcagcttgctgaggaagaggagcagccatcctctcccgggaatgaaagtaacgccgaactgcatgccagcggctattacacgctgtttgctgacacggtaccagatgatgttaagaggctgtataatgaactggcgacgggcgatttcgccgcgctggcgcaaaccgcccaccgcctcaaaggggcatttgctatgctaaatctggtacccggcaagcagttatgtgaaacgcttgagcatctgattcgtgaaaaagatgcgcaaggcatagaaaaatatatcagcgacattgacgtttacgtcaagagcttgctgtagcaaggtagcctaatacatgaacaatatgaacgtaattattgccgatgaccatccgatcgtactgttcggtattcgtaagtcacttgaacaaattgagtgggtgaacgttgttggcgagtttgaagactccaccgcattaattaacaatctgcctaaactggacgcacacgtcctgattaccgatttatcgatgcccggtgataaatacggcgatggcattacgcttattaaatacatcaagcgtcatttcccggacctgtcaatcattgtactgacaatgaacaacaacccggcgatcctgagcgcggttctcgatctggacatcgaagggatcgtcctgaaacagggtgcgccgaccgatctgcctaaggcgctcgccgcgctgcaaaaaggcaaaaaattcaccccggaaagcgtttcgcgcctgctggaaaaaatcagcgccggcggttacggcgacaaacgtttgtcgcccaaagagagtgaagtactgcgtctgttcgccgaaggcttcctggtcaccgagatagccaaaaagctcaaccgcagtatcaaaaccatcagtagccagaaaaaatcggcgatgatgaagctcggcgtggaaaacgatatcgccctgctcaactacctctcttccgtttccctgagctcaacggacaaagactaacgtctctcttcccggatagcgcggcgctatccgggaaacatcttttattccctgcccttacgtacccgcgcggcgtagaccgtcagcgtctgcttgataatatccagagtgaccggttttgaaaggcagctgtccataccggactccaggcagcgctgcttctcctccgccagcgcgttggcggtcaccccaataaccggcagcgtaagccctagctggcgaatgcgctgggtcaggcgataaccatccatattcggcatgttgacgtcgctgagcacgatatcaatatgctgcttgctcaggacattcagcgcatcgaccccgtcatttgccgtcacgcactgatagcccagcgatcccagctgatcggccagcagacgtcggttaatcggatgatcgtccaccaccagaatcatcatgtcatcattgctggcggtttgcgcatccgccgcggatagcgcagggccgttttccgtactggccatggcaatatggaagatgcgggccagcagcggcagcagctcgtgcggcgtggccacgctatgcagccactcgccgggcgcccgctcctgcggaataccgatatgccgacgagagaagatcaccatcgcgcagccgtcccaggcgttacgcgtctcgctatcggtcaacagaatatcctccgcgcccggcgcttgcccggcaaaatgacggaccggaataccgtggtatttcagcaactgctcgacgaacagcgccagcgagctgttatcaatcgccagccagcagcatttttccgccaggccatcaatattcggcgacggcgtattttgtacgccataaagcgggatacgaatagtgaagcggctgcccataccaggctcggtttcaacggcaatatcgccatccatcatgctgataagcttttcacaaatcgccagaccgagtccggtcccctggaaattgcgctgcacgccggtccccacctggaagaacgggtcaaacaggcgtacgacctctttcgccgggatcccttccccggtatcgcgtacgctgatgcgcagataatcctccgcccgctctacgtgcaggataatgcagccggtatcggtaaacttaatcgcgttactcagcaggtttgaaataacctgctgcaggcgcatcggatcgccggacatcagctgcggtacgtcaggttcaataaagcagtacagcccgagatgtttccgcaccaccagcggcagatagttggcggaaatatggttcatgacctcgcgcggcgaaaactcccgcggctcaattttgagctgttcggactcaattttcgagaaatcgaggatgtcgctaataattttcagcagcaggctggaagagttgttcatcgccgtcaccagacgatcgacgcccttcggtagctctttggtctgcaataaatcgaggttaccgataatcccgtacagcggcgttcgcagttcgtggctgacggtggcaaggaacatcgatttcgactggctggcctgctcggcggcctgggccatctcctgcagcgactcttccattttgacgcgcgcagagacatccaccagcacgcaaatcgccacgttctcgttacggtagcgcgagtggacaaagctgatttgcagattggtattgttgctggtcagcacatcgacgaagttcacctgctggccgcagataatttgcgtcagccgctgccgatcctcatgggttagcatattgagatagttatgcgccagctcgttactcaggatattggtgccgtcgatcgtacgtaaaatacagatccccaccggcgcggaggcaacgatttttcggttgaactgctcgtgctcttcgaggcgctgggcgtcgttttcagccggaataaaaatccgccgttcatacatgcgggcaagcgcaaaaaggagcccgccggtaagcagattgagcaccacggcgttcagtatcagcatccggatgcgttccagtacctgatccaccggcaccgaatagacaatgctcaacgatgacggcggcaggctttttttcatcgccagctcgcgaaaaccggcggtatagccgaaccacagacgctcctgcatccacttcgcatccggtttaatattgctatccgacccggcaagcgagatcagcgtctgtccgctatcgtcgagaatcgtcacgttcatcggcaaactgcctggggtaaagaagctttccatgcggatggtttgctctacgccaagcatggcctgcaggcgattcgccacatagattggggtcagcgcatagaaatagccaacgcccggacgcacgccctggcttatccagaacagattgttaccgcgctcgttttgcggcgcgtcgcgatactgctcaatgcgctgatgcagcacttttaacgcctggtcccgctccagcggaatatcgcgcaggccgaagttggccatacacagattgtcgctaccaatcataaaaatacgattgaggtcgtaggccgttgagaaattgtcgcgccagtagcgcataaaccacgccagtgactgcagcgagttacgccaggtcgtactcatcagcgcgcagtcggaatccgggtagagcggttcaaaatcagggatcgtaatatcaccgcgctgcaccggcgtatcgccgccttcgctaccgtccatcggccggttgccggcaacgtatttcagctctttgatcacatcggccgtacgctgtatgtagcgctgcgcctgatcggcattgaggttaaattcctggcgaatttccgattcgcgatcgtgcaacgcattgacgatgtaaaacaccgaaacaaaagcgaccagcacccacagcagtatcgccagcgctctgaacagatagcgtgaaacctttaacgtgttatggaaagaagctagatatttcaatgtggcgatgctcggccgtcaggggctcaacagaatggcgttaaggtaacgataaaacaacggtcccgcaacgggaaaacaaaaagggccggggagagccccgaccctttcagacaattaccgcagagaattactcttcgtcttcggcgatgtcatcgtcagtatccgcttccggcgcgatatcttcgtcgccttccgccgcgctgccgtcgatggcatccagctcttcgtcatcaaccggctcagccacgcgctgcaggccgaccacgttttcatcttccgcagtacgaatcaggatcacgccctgagtgttacgaccgacaatgctcacttcagatacgcgggttcgtaccagcgtgcccgcgtcggtgatcatcataatctggtcgcagtcatcaacctgcaccgcgcccacaacggaaccgttgcgttcggtcactttgattgagataacgccctgggtcgcacgcgacttagtaggatactcttcagctgcggtacgtttaccgtagccattctgcgtaacggtcaggatcgcaccttcaccgcgcggaacgatcagagaaaccactttgtcctcgccggccagcttgatgccgcgcacgcctgtggcggtacggcccatcgcgcggacggcgtcctctttaaagcgcaccactttaccggcggcggagaacagcatgacttcgtcctgaccggaggtcagatcgacgccaatcagctcgtcgccttcgttgaggttaaccgcgataataccggcggaacgcggacggctgaattcagtcagcgccgttttcttcacggtaccgctggcggtcgccataaagacgttcacgccctcttcgtattcgcggaccggcaggatcgcggtaatacgctcgttggcttccagcggcagcaggttgacgatcggacggccgcgcgcgccgcggctggcttccggcagctgataaaccttcatccagtagagacgaccgcggctggagaagcagaggatcgtatcgtgggtgttggccaccagcaggcggtcgatgaagtcttcttctttgatacgcgccgcagatttacctttaccgccacgacgctgggcttcgtagtcggtcagcggctgatacttcacgtagccctgatgcgaaagggtcacgacaacatcttcctggttgatcaggtcttcaatgttgatatccgcgctgttcgcggtgatctcggtacgacgcgcgtcgccgaactgttcacggaccagctccagctcttcgcggataacttccatcaggcgatcggcgctgcccagaatgtgcagcagttccgcgatctgttccagcagctctttgtattcatcgagcagtttttcatgctcaaggccggtcagcttctgcaaacgcagatccagaatcgcctgcgcctgctgttcagtcaggtagtactggccgtcgcgtacgccgaactcgggctccagccattccggacgggcggcgtcatcgccggcgcgttccagcatcgcggaaacgttgcccagatcccatgaacgggcgattaaggcagccttcgcttccgccggggtcggcgcgcggcgaatcagttcgataatcggatcgatgttggccagggcaatcgccagcgcttcgaggatgtgcgcgcgatcgcgggctttacgcagttcaaaaatcgtacgacgggtcaccacttcgcggcgatggcgcacgaacgcggcaataatttctttcaggttcatgatcttcggctgaccatggtgcagagcaaccatgttaataccgaaggagacctggagctgggtctgcgaatagaggttgttcagcaccacctcacccaccgcatcgcgcttcacttcaatcacgatgcgcataccgtctttatcggactcgtcgcgcagcgcgctgatgccttcgacgcgtttgtctttgaccagctcggcgattttctcaatcaggcgcgctttgttcacctgatacggaatttcatgcacgatgatggtttcgcggccggttttcgcgtcagcttccacttccgcgcgcgcgcgaatgtacactttaccgcgaccggtacgataggcctcttcaatgccgcggcgaccgttgatgatcgcggcggtcgggaagtccggacctgggatgtgttccatcagcccttcaatgctgatgtcttcattttcaacgtaggccagacagccgttgatcacttcggtgaggttgtgcggcggaatattggtcgccatacctaccgcgatacctgacgaaccgttgactaacaggttcgggattttggtcggcataacgtcagggatcttttccgtgccgtcatagttatcgacgaaatccaccgtctctttttcgaggtcggccatcagctcatgggcgatcttcgacatacggatttccgtataacgcatcgctgcggcggagtcgccgtcgaccgaaccaaagttaccctggccatctaccagcatatagcgcagggagaatggctgcgccatacgtacaatggtgtcatacacggcagtatcaccatgagggtggtatttaccgattacgtcaccaacgacacgggcagattttttataggctttgttccagtcattgcccaatacgttcatggcgtatagtacgcgacggtgtaccggcttcaggccatctcggacatccggcagcgcacggccaacaatgaccgacatcgcataatccagataggagctcttcagctcttcctcaatgttgaccggtgtaatttctctcgcaaggtcgctcatctaaccgctatccctctactgtatcccggattcaaaggtcgcaaattataacacagccgcggtgatacgggtaaacctatacccaatgattttcgcgcggcgaaaggcgacagggatagacggtttattcatccctgaggcctgatatactcgcgggtctgaactgaacaggagtaaaagcgcccatgaatgccgaaaaaccgtcggtggcccacaatgttgatcataatgaaatcgctaaatttgaagccgtcgcctcgcgctggtgggatttagagggcgaattcaagccgttacatcgcatcaatcctctacgcctcggctatatcgcggagcgctccggcggcctgtttggcaaaaaagtacttgatgtcggctgcggcggcggcatcctggcggaaagcatggcccgggaaggcgcagcggtgaccggtctggatatgggcttcgaaccgctacaggtggcgaaactgcacgccctggagagcggcattcaggtcgaatatgtccaggaaaccgttgaagagcacgcggcgaagcacgccggagagtacgacgtcgttacctgcatggagatgctggagcacgtcccggatccgcagtcggtcgtccacgcgtgcgcgcggctggtcaaacctggcggtcaggtgttcttctcaaccattaaccgcaacggtaaagcgtggctgatggcggtcgtcggcgccgaatacatcatgaaaatggtgccgaagggaacccacgacgtgaagaaattcatcaagcccgcggagctgatcggctgggtagatgagacaattctgaaagagcagcatattaccggtcttcattacaatccgttgaccaataccttcaagctggcgccaggggtggatgttaactatatgttgcatacaacggcgaaaaaagcataacgtcagctgtatttcctatgatgattgcgcggcatcaagccgcgtgattttttcttccgatgaagaaatcagcactcgatcaaattttcatttttttttctgatttattgacatcttctccaggccttatgtggcgtggacttggcgattattacccttccgcaacctcaatttaacgtcaaaatcaactcttgtactcaaaagaatccttactagaatactcaccatatagcgtttcttttatcgaccaccccctacatatagtatttatccacagagttagtcacaacggcgttctgtggataagtgggggatattttctttcacggacaggtataatccacatgaatcagagtctgctggtgacaaagcgtgacggtagcaccgagcgcatcaatctcgataaaatccaccgcgtgctggattgggcggcagaagggctgaataacgtatccatctcccaggtagaactgcgttcccacattcagttctatgacggcatcaaaaccgccgacattcacgaaaccattatcaaagccgccgcggaccttatctcccgcgaggcgccggattaccagtatctcgccgcccgtctggcgattttccacctgcgtaaaaaagcctacggccagtttgagccgccagcgctgttcgaccacgtgtcgaaaatggtgaaaaacggcaaatacgatactcatctgctggaagactacacggaagaagagttcaagcagatggactcgttcatcgagcacgagcgcgatatgaccttctcctacgctgcggttaagcagctcgaaggcaaatatctggtgcagaaccgcgtcaccggtgagatctatgaaagcgcccagttcctgtacattctggttgccgcctgcctgttctccaactacccgcgcgagacgcgtctgaactacatcaagcgtttctatgacgcggtgtcgacgttcaaaatctcgctgccgacgccgattatgtccggcgtgcgtaccccgacccgtcagttcagctcctgcgtactgatcgagtgcggcgacagcctggattctattaacgccacctccagcgccattgtgaaatacgtctctcagcgcgccggtatcggcatcaacgccggccgcatccgcgcgctgggtagcccgattcgcggcggtgaagctttccataccggctgtatcccgttctataagcacttccagacggcggtgaaatcctgctcccagggcggcgtccgcggcggtgcggcgaccctcttctacccgatgtggcatctggaagtcgaaagcctgctggtgctgaaaaacaaccgcggtaccgacgccaaccgcgttcgtcacatggactacggcgtacagatcaacaagctgatgtacacccgtctgctgaaaggcggcgatatcaccctgttcagcccgtccgacgtcccgggcctgtacgatgcgttcttcgccgaccaggacgagttcgagcgcctgtacacccaatacgagcaggacgacagcatccgcaagcagcgcattaaagcggtagaactgttctcgctgatgatgcaggaacgcgcctccaccggccgtatctacatccagaacgtggaccactgcaacacccacagcccgtttaacccggttgtcgcgccggtgcgccagtccaacctgtgcctggaaatcgccctgccaaccaagccgctggaagatgtgaacgacgaaaacggtgaaattgcgctgtgtaccctgtccgctttcaacctcggcgttatcgatagccttgatgagctggaagagctggcggtgctggccgttcgcgcgctggatgccctgctggattaccaggactacccgatcccggcggccaaacgcggcgcgatgggccgtcgtacgctgggtattggggtgattaactttgcctactatctggcgaaacacggtaaacgctactctgacggcagcgctaacaacctgacgcataaaacgttcgaagcgattcagtactacctgctgaaagcctctaacgagctggctatcgagcaaggcgcgtgcccgtggtttaacgaaaccacctatgcgaaaggcattctgccgatcgatacctacaaaaaagacctggacgctatcgtcagcgaatccctgcattacgactgggagcagcttcgcgagtcgatcaaaacgcacggtctgcgtaactccacgctctccgcgctgatgccgtccgagacctcttcgcagatctccaacgccaccaacggcattgagccgccgcgcggtcacgtcagcatcaaagcgtcgaaagacggtatcctgcgccaggtggtgccggattacgaaaaactgcagaacggctacgagctgctgtgggaaatgccgaacaacgacggttacttgcagctggtcggtattatgcagaagtttatcgaccagtcgatttctgctaacaccaactacgatccgacgcgcttcccgtctggcaaagtgccgatgcagcagttgctgaaagacttgctcaatgcctataagttcggcgtcaaaacgctgtactatcacaacacgcgcgatggcgcggaagatgcccaggatgacctggcgccgtccatccaggacgacggctgcgaaagcggcgcatgtaagatttgataatattgcccggcggcgcgttgcctgccgggcctacggtctaatgtaggtcgggttagcgaagcgccgcccggcgtataattccaggacaggatccccactcatggcatacaccaccttttcacagacgaaaaatgaccagctcaaagagccgatgttcttcggtcagccggtgaacgtcgcccgctacgatcagcaaaaatatgacatcttcgaaaagctgattgaaaagcagctctccttcttctggcgtccggaagaagttgacgtttcccgcgaccgtatcgactatcaggcgctgccggaacacgaaaaacacatttttatcagcaacctgaaatatcagacgctgctggactccatccagggccgcagcccgaacgtcgccctgctgccgctgatttcaattccggagctggaaacctgggtggaaacctgggcgttctcggagaccatccattcgcgctcctacacccatatcatccgcaatatcgttaacgatccggcgatggtatttgacgatatcgtcaccaacgagcagattcagaaacgcgcggaaggcatttccagctattacgatgaattgattgagctgaccagctactggcatctgctgggcgaaggcacccacagcgtgaacggtaaaaccattaccgtgaacctgcgcgagctgaaaaagaaactctacctgtgcctgatgagcgtgaatgcgctggaagccatccgtttttacgtcagcttcgcctgctctttcgcctttgccgagcgcaagctgatggaaggtaacgccaagattatccgcctgatcgctcgcgacgaagcgctgcacctgaccggcactcagcacatgctgaatctgctgcgttccggcgtcgacgatccggagatggcttcaatcgccgaagagtgcaaacaggcgtgctacgacctgttcgtgcaggcggcgcagcaggaaaaagagtgggcggattatctgttccgcgacggttcgatgatcggcctgaacaaagatattctctgccagtacgttgagtacattaccaacatccgcatgcaggcggtaggtctcgatctgccgttccagacccgctccaacccgatcccgtggatcaacacctggctggtgtccgataacgtgcaggtcgcgccgcaggaagtggaagtcagctcttatctggtcgggcagatcgattccgaagtcgacgctgacgatctgagcaacttccagctctgatgaaacgcattttcttgaagatttctgacactcgccttgagtgtcaggatgaacatccctccctgctggcggccctggaatcgcacaatatcgacgtggagtatcagtgccgcgaaggatactgcggatcgtgtcgtctgcgtctggtttccggtcaggttgactggctcaccgagccgctggcgtttgtccagccgggagagattttgccctgctgctgccgggcaaaaggcgatatcgaaatcgaaatgtaagccagcctgaaacgcattcccattctttatagggttcgttttttacgaaccctgggttcgtcttcctatccctgttcacctccccccactccgcctactctacctgtataagccaccggataaagccatcagcaatgatcgcagcaacgctggctgatgctctgcgtcacgacattcatgaggagataaaaaatggcttccgtcaaagaggaaaactgcgccaacggactgaaaaaagcatacgacgtcatcgtggtcggtggaggttcggcgggtgcggtactcgccgcacgtctgagtgagaaccccgattgccaggtagcgctgctggaaggtggccccgttttcgcccctgatgcctggccggacgagctggcgcacagccactctgttggtggcggcgattacgtctgggagcgcggggtagcaacgggaaccgatcacacggccggtcatctgcgggcaaaagtacttggcggcgggtcaacgatcaatgccggcgcgtttgttcgcgcccccaaatctgattttgaccgttgggtcaagcgcggcctgagcgactggtcgttcgataaggttttaccctggttcaaacggcttgaaaacgccgactatggcgacgatcgctggcatggtcgccacggcccggttccggtgcggttaccggcgctggaaacgctcagcccggcaagccaggcgttttatcatgcttgccgcgctcacggcttcgccgccgttgacgatatcaacggcgcgcagcagcacggcgtcgcggtctacccggtcaatgttgtcaacggcatccggcaaaataccgccatggtctacctgacggcagacgttcgcgcgcgcaagaatctgtcgattgtcggcatgacggtcgtggataaagcgttgattgaaggttcgcgcgtgaacggcatacagctggcggacggaacacagatcgctaccgacaacgtattcctgtgcgccggcgcggccggtacgccagcgattctgttgcgctccggcattggccctgcggacgatttacgccatctggagatcacggtgaaacaggatctccccgttgggcgcaacttgcaggaacaacccgtgaacgggatcatgctggcaacgtccgctaagcatgccagttatccccctataggcacaacgctctggacgcaatcttcgctggcggcagccaacgaactggatctctatatcagcaataaccacttcgtcgatcctgaactatttccacatggtgcgggtttccagctctttttcaccgtggcgcgcccctttgcccgcgggcgtctgactttggcgagccgcaacccgctgctcggcccccgtatcgatctcaatttactgggtgacgagcgcgacgtcacgcgaatggtcgaagcggtgaaattatcccgggcgctggtgcaggaaggtccgctacaggcgctggtgattggcgaagtcccgatggtaaaaggcggtacactggcagaaacagaccagcagatagcagaagaacagcgtaagacggtgaaaagtaacctgcacctcagcgcgactgcgccaatggggaacgaaagcgatcccatcgccgtcgtggacgcctgcgggaaagttttcggtattgccgggctgtttgtcgtcgatgcctcgctgttcccggacgttccctctcaggcgaccaatccggatgcgatcatggcggcagaatatctcgccagccgtttttctggcgcatagaacgaggcatagtcaaccgcaagacccgaaaaaggagcgcctgtgtgaacaagttcgtggaaatgagcacgtttatttcggttgttgagtctctgagctttgtcggcgcggcggcaaaattggggacatcaaaatcggtagtcagccagcgcgtcaagatgctggagaaacggcttggcgccagcttactggagcgcgggccacggcttagcctcacggaggcgggcctgctattttatcaggagtgcgtacggctgcttgacgaagtcacgctggcagaagaggcggtggccccgtcacgcagcgagcttcggggcgggctgcggattgccacctcgcatacgtttatgaccactcatctatcgacaattctggccggttttatccgcgaccatccggggttgtctctcgatatcgcgacggaggaccggcagatcaatatgcaccagcccgactttgatatcgccatccgcctcggcctcgtcccggactcaacgctcatcgcccgaacgctggcgcgcaacctgacctggctctgcgccagcccggactatctgtcgcaacggggcacgcctttgcatcctgttgaactggagcagcatgacgggctgctatatacccatcgcgcgccggggggctgctggcagttgctgcataacgggcagcgccagacctggcgggtcaaaaatcgtctgcgttcggataacgccttcagcctgctggaggccgccagaatggggcttgggattgtggtcatgccgctatttttaggcgctgaagcgatcgtgcggggagagctaaaaattattttacccgactggcagccggagggtggcaacattgtggcgctgtatcgccagacgcgtcgcgcctcgccagtgattcaggcgctggtcaacgaggttgcggaaaagctggggccagagccagagtgggaaaaacagctacgactggccgggctgctgcccctctgcaacaggggcgcaagcgcccctgattaatggcttactttttattgaggaacttcaccgccttatccgggaaatccgtaaacaacccgtccacgtccgcctggttatacaggacgtcgtaaagctgctccacgtccgctgcatacgctggcagctgatccgcgcggaccgtatacggatgcacctgcagcttgctggcatgggcttctttcaccatcgccgtcagcttcacgtgacccggcgtcgagccttccgccaccagcatatggtagtccgggccaatgccgtcagcgtactgcgcgatctgcgccatcgcccccggtttgaacatccagtcatagctgtagttcacccacttgccgtcggcctgccgctgctgggtctcattccagtcggtataggcgataagctgcaccagattgagatccatccccattttcggctccagctcctgcttgatgcgcttgagctcgttggcgtcaaagcactgcagataaaccttatcctgcttgccggtgtagccatatttcttcagcacgttcagcgtgctggcggcaatatccttgccttcctgatggtggaaccacggcgctttgatctccgggtagatgccgatgtttttgccggtcgaatggttcagcccctgcacaaactcaatctcctcttcaaaggtatgaatacggaaatcagatttacccatcgggaaacggcccggataagtttgcacgttcttgccatctttcggctcaaacccttcggtaaacttcagcgactttatctcggcgagggtaaagtcgatggcgtagaagcggccatcttgacgcgcccgctgcgggaaacgctgggccacgtcggtcacccgatccagatagtggtcatgcagcaccaccagccggtcgtctttagtcatcaccaggtcttgctcgaggtagtccgccccctgcgcgtaggccatcgctttcgccggcagggtatgttccggcagatagccgctggcgccgcggtgggcgataacgattttctcccccgcgacggcgctgaaagagagcgccgtcgcagccagcagcattccgctcatcagggtggttaatgtgcttttcatcgccgctccttaagcttgtttcatctgttggtgatggcgtcgttcgcccagcatcacgataatcagcagcaggaccgccagcacgctgccgccgatcattaccataaagccgccgtcccagccgaagaaatcgacggtatagccaacgatggcgctcgcggccacggagccgccgagatagccaaacaggccggtgaagcccgcggcggtgccggcggcttttttcggcgccagctccagcgcatgcaggccaatcagcatcaccggaccgtaaatcaggaagccgatgatgatcatgcaggccatatccacgcccgggttacccggcgggttcagccagtagacgacggtggcgatggtgaccagggtcataaagaagacgccggtcgcgccgcggttgcctttaaacactttatccgacatccagccgcacagcagggtgcccgggatccccgcgtattcataaagaaagtaggcccaggacgatttatccagcgcgaagtgcttaacctctttcaggtaggtcggcgaccagtcaagaatgccgtagcgcagcagataaacaaacacgttcgcgatagcgatgtaccacagcagcttgttcggcaggatgtactgcataaagatctgctttgcggtcagctcttcttcgtgcttctcgctgtagtcgtcaggataatcgtttttgtactcttcgatcggcggcaggccgcaggactgcggagtatcgcgcatcatcgcgaaggcgaaaatcgccagcaggatcgcgccgaaagccggcatatacagcgccgcgtgccagtcgttaaaccacgccatccccagcagaaacagcagcggcgggatcccgccgccgacgttgtgcgcgcagttccataccgaaacaataccgccgcgctctttctgcgaccaccagtgcaccatcgtacgtccgcacggcggccagcccatcccctggaaccagccgcacaggaacagcaggacgaacatcaccataatgctggaggtcgcccaggggacgaagcccatcaccagcatcaccagcgcggcaaggatcaggcctgccggtaaaaaaatgcgcggattcgaacggtcagaaaccgaacccatgatgaatttcgaaaatccgtaggcgatagagataccggaaagcgcaaagccgagatcgccgcgggagaacccctgctcaataagatagggcatcgccaaagcaaagttcttacgaaccagatagtaagcggcatatccgaagaagataccgataaagatctgccagcgtaatcgacgatatagcggatcgatttccgccgttggcaaacgcgctttatgcgctgcgggtttaaatatacttaacatatcagcctccgtggccattgctgttcttctgacgtcgtcgcaaaaaaacgtaatttattcactgacttctgatttggtcgcgatagtaggcaaagcgtaaatctaatactgtgaaatgtcgcacactttgttacagaaatatgacagaactttccaatatgcgcataaagtcacaacaaacgctcgaattacgcgcaaatatgctcgaaatcaaacattaaacgcggtcgatatggctaaatgatgtaaaacgaacacagaggacagggagatggccgatagtcgtgaatatgacgtcattattattggcggcggcgccaccggcgccgggatcgcgcgcgactgcgcgctgcgcgggctgaaggcggcgctggttgagcgctacgatatcgccaccggggcgaccggccgcaaccacggcctgctgcacagcggcgcgcgctatgcggtaaccgatagcgaatcggcgcgggagtgtatcagcgaaaaccgcatcttacgccgcatcgcccggcactgcattgagcccaccagcggcctgtttattaccttgccggaagacgatccggcgtatcagcacacctttatcaccgcctgccagcaggcgggtattgaggcccagcctctgacgcccgccgaggcgctgcgcattgagcctgcggttaacccggcgctgctcggcgcggtgcaggtccccgacggcaccgtcgatcctttccgcctcaccgccgcaaatatgctcgatgcccgcgaacatggcgccgctatcctcaccggctgcgaagtcaccggcctgctgcgtcagggcgatcgcgtccatggcgtcacgatctacaaccatcagctccgtgaatcgcgcacgctgcgcgcgcaggtggtggtcaacgccgccgggatctgggggcagcgcatcgcagagtatgccgacctgcgcatcgcgatgtttccggcaaaaggatcgctgttaatcctcgaccatcgcattaaccgtcaggttatcaaccgctgccgcaaaccggctgacgccgatatcctggtgcccggcgatactatttcgctgattggcactacttcgatgcatattccctatgacgaaattgacgacaaccgggtaacggccgaggaggtcgaaacgctgctgcgcgaaggggaaaagctggcgccgatcatggggcggacgcgggtactgcgcgcctactccggcatacgtccgctggtcgccagcgatgacgatcccagcgggcgcagcgtcagtcgcggtattgtgctgctcgaccacgcccggcgcgacggactggagggctttatcaccatcaccggcggtaagctgatgacctatcgtctgatggcggagtgggccacggatgcgctctgccgcaagctcggaaataccgtcccctgtacgaccgccgatacgccgctgccgggctcgcaggagccggcggaagccacgctacgcaaaatcatctctttacctgcgtcgctgcgcgggtcggccatctatcgccacggcgatcgcaccccggcctggcttggcgatagccgccagcaccgcagcctggtctgcgaatgcgaggcggtgaccgccggcgaggttcagtacgcggtcgaaaacctggcggtgaaaaacctgctcgacctgcgccgccgcacccgcgtcggcatgggaacctgtcagggcgaactgtgcgcctgccgcgccgccgggctgctcgcgcgttttaacgtcaccacttccgcacgatcccttacccagctgtctcaatttttgaacgaacgctggaaaggcgtccagccggtggcctggggggacgcgctgcgcgaaagcgagttcacccgctgggtctatctcggcctgtgcggattacaaaaggagcatcaggatgaagtttgattgcgccatcatcggcggcggcctcgccggactgctctgcgggctggcgctcaaccagcgcggcctgcgcagcgtgattatcagccgcggccaaagcgccctgcacttctcttccgcctcgctggatttgcttaccacgctgccgaatggcgacaccgtcaccgatgtcgctcacggcatcggccagctggcccgccagcttcccgaacatccctatgccaggctcggcgccgaacgggtgatggattacgcccgccagagtcaggcgctgtttgccgactgcggtatcgccatgcagggcgacgccagccagccgcatctgcgcgtgacgccgctgggaaccttacgcgcggcctggctatctccgcaggaaatcgccagcgcgccgctgcccgccagcggcgtcggcgtggtcggcatcagcggattcggcgacttccagccgcatcttgccgccgcctctctgaaccagcacggcgtgaccgccgaagcccatgagatagatttacctctcctcgatgtgctgcgcgatagcccatccgaatttcgtgccgccaatattgcccgccggctggacgatgaagcgcactggccggccctgctggcggcgctgcgcccgctggcgcagcggcataatttactgattatgcccgcctgctttggcctcgccgacgatcgcctgtaccagtggctgcagcagcgcctgccctgcccgctgcgcctgctgcctacgctgccgccgtcggtgccggggatgcgcctgcacgcccagctgcagcggcaatttatccgcagcggcgggacctggctgaccggggatgaagtcatcgatatcagccaccgcaacggtagcgttaacgcgatctggacgcgcaatcacggcgatatcccgctgcgcccgcgcttcgcggtgctggccagcggcagctttttcagcaacgggctggtcgccgagcgcagcggcgtgcgcgagccgatcctcggccttgacctgcagcagacgctgccgcgcgagcgctggtatcagcaggacttttttgcctctcagccctggcagcgtttcggcctgaaaaccgatgcggatctgcgcccgcagcttcaggggcagacgctggaaaatctgttcgccgtaggcgcgatcctcggtggttttgacgccatcgcgctgggatgcggcggcggcgtttgcgcggtgaccgcgctgcatgctgctgggttaatcggcgagcttgccggaggtgaatcatgaacgatacgcgctttgaacactgtataaaatgcaccgtttgcaccaccgcctgcccggtcagccgggttaatccgcgctatccggggccaaaacaggccgggccggacggcgaacgcctgcgcctgaaagacggcgcgctctacgacgaggcattgaaatactgcatcaactgtaaacgctgcgaagttgcctgcccttcggacgtcaaaattggcgatattatccagcgagcgcgcatggagcacggtcggcaaaagcccacgctgcgcgatgcgatcctcagccataccgacctgatgggcaccctctccacgccgtttgccccgctggtcaacgccgccaccgggctgaggccggtacgccaaatccttgatgccgcgcttaaaatcgatcaccgccgcacgctgccgaaatatggctttggtacctttcgccgcgcgtatcgtcagctggccgcccggcaggggcagtacgccgagcaggtggcgttttttcacggctgctatgtgaactacaacaatccgcagctgggcaaagatcttatccgcgtgttcaacgccatgggcatcggggtgcagttattgagcaaagagaaatgctgcggcgtaccgctgattgccaacggtttttttgcgaaagcgcgcaagcaggcgctgagcaacgtcatcgcgatgcgggaaaatagtctgcccattattgcgacttcatcgacctgcacctttacgctgcgcgatgaatatccgcatctccttgatatcgataatcacgatatccgcgaccggattgagctggcgactcgctggctctggcgtcagctggataatgggcgacctctgaagctaaaaacgctgccgctgaaggtggtctatcacacgccctgccatatggaaaaaatgggctggtcgctgtatacccttgagctattgcggctgatccccggcttgcagctggaggtactcgactcgcaatgctgcggtattgccggcacatacggtttcaaggcggagaactacgactcatcgcaggcgatgggcgcgccgctgttccggcaaattgaggagagcggcgcggatctggtggtgaccgactgtgaaacctgcaaatggcagatagagatgtccaccagcaaacgctgcgaacaccccatcaccctgctggcacaggcgctggcctgacgccagcgccagcaccggggggctagtagctcccctttccctccgcctgttcggctatcggcttgaacatcgccagccgtttatccagcgcgctggtgtaaaggttggtatcgacgccaacggcaacaaaattcgccccccacgccagcgctttgtgcgccatctccggatcgacggcaaggaatccggccgccttacccgccgcgcgaatgcggcggatgctctgttcaataacccgctgcacttcaggatgaccggcgttatccgggtagcccagcgaggctgacaggtccgccgggccgataaacacgccgtcaatgccctccacttcaaggatcgcatccagattatcgagggccgttttactctctacctgaatcaacaggcacagcgcatcgttggcctgcgccatatagttttcgacccgtccccagcgcgcggcgcgggccactccggcccccaccccgcgggtacccagcggcgggtagcgggtagccgagacaatctcccgcgcctgttcggcggtatcgaccatggggatcagcagcgttctggcgccgatatccagcacctgtttaatcaggctgcgattgccctctaccgggcgaatgaccggctggctggcgtagggcgcaatggcctgcagctgatgataaagatcctggatggtattgggcgcatgttcgccgtcaatcagcagccagtcgtaacccgaggtggcggcaatctcagccatataagaagaggtcgagctcagccacaggccaatttgcgcttccccttgtaataatcccgctttaaatgggttcgataaaattgcgttcatagttctcccttacattaatgctgtacgctgccagcctgcggcacggcgcggttcacgcgcagtgaaaagataataaccaccccgacaatcgccacgcaggcgagcgtcactaatccggcagaatcactggcgaacatggtttcagcctggacgcggataatgggcgccagaaacccgccgatagcgccgaacaggttcacaaagccgatgccagcggccagcgccgtaccggacaacagctgcgtcggcatggtccagaagaccggctgcacggcaatgacgccgacggcggcaacgcacagcgcgataatcgccagcaccggcgacaccagcccggagaccgcaatgccaattgccgccgccagcagggtgaatgccgccacattacgccgctcgccggtgcggtcggagtagcgcggaatcagccaggtaccgaacagcgccgccacccacgggatcgcggtcaccaccgacgccacgaaccccaccttggtgccgagcagcgcggcaacctgggttggcaggaagaagatcaggccgtaaaccgccacctgaatggtgagatagataatcgccagctgccagacgcggccgttacgcagcgcatcggacaaacgcgaggtcacctttttctgctcttcgctggccagctcgctgattaacgcctgtttttcggcagcgctcaggaagcgcgccttttgcggcgtatcgtcgagccagaagaaggtgaagaaccccgcgccgaccgccagcagcccctcaatgataaacatccagaaccagccgggatgccccataaaaccatgcatttccagcagcgcgccagagagcggcgacccgagggtcagcgccagcggcgcgcccatataaaacagccccataatgctggcgcggttctgctgcggaaaccactgggacgtcaggtagatcatgcccgggaaaaaacccgcttccgcggcgcccagcagggtgcgcaccagcagaaacttcgcttcggtatccgcccacgccatcgccgcggagagaagcccccacagcaaggtggtgcagccgatccactttcttgcgccgaatttgcgcatcagcaggttagcgggcaccccgagaaaggcgtagaccacaaagaaaatccccgctcccagcgcataggcttcgttgctcaggccggtatccagctgataggtctctttggcaaagccgatattcgaacggtcaagaaacgccagcacgtacagcgccagcataaaggggatcaaacgggcgcggtttttcttcaccacgctctcaagcaaggcgttgctcatcgtaatatcctcaacaataggccgcacatctgcgctgtgcggcacgacgggatcagtggctataaggacgtttcagattacagtcgcggttcagctccacgccgaagcccggtttgtccagcacggttttatgaatgcgcccgttcaccggtaccggctcatcaaccagaatcgggtcaaactgcggacgcatcgttgagcagtcggggctggtcatcaggaactcgctgaaaggcgtgttggtaaaggtaatgaccgcatggtgcgaatagaccgacgagccgtgcggcaccaccagctggccgcgcgatttggcgatcgccgcaatctccaccagcgtggtcaggccgccgcaccagcccacgtcaggctgcataatatcgatgccggtttccgacagcgtgcggaaggattgcagcgtaccgtggtgctcgccgctggtgaccatcatgccggctggcgcattacgtttaagctcgcgatagccttcatactgctgcggcggcaggcactcctcgatccacttaaggttagagggcgcgcaggcgtgggccagtttagtggcgtagttaacgtcctggctcatccagcagtccagcatcagccagaagtccgggccgcacttttcgcgcatatcggccaccatcgcagcatctttgcggatccccgcgtcgccatcgtgcggcccccagtgggtcggcattttgccgccaataaagcccatctctttcgccaggtccggacgcgccccggtggcgtagaactgaatttcatcgcgcaccgcgccgcccagcagtttgtaaaccggcagcccaaccactttgccgaacagatcccacagcgccaggtcgacgcaggaaatcgtattcatcaccaggccgccggatccggagtagtacagggtggcgttgagcatctggtcatggatcagtttgatatcgctgacgcatttgccttcgataaagcggttgaggtgtttttccacgataaagcagcccatctcgccggcggtcgataccgcaaagccggtctgcccgttttcggcttcggcctcaacgatcagcgtgccgagaacgttgatgccaaacgactggcgggactgttcatactgtttatatttgctcataggcgtggcgatatgatcgtcaatccagtgatttgccccctggtcatgataatcgccgccgccagcgcctttctctgcggtagcaccgccaataaaccaggcgcggacgtgtttaattttcggtagggtcatgatcttctccttattatgaggcttgttgttcgaaggggcttttccaccccagcagacgggaaatatctttggcgcaggcaatcgccctaccggcgaggtaatcgcgattgtcttcattgatttgcagacgggtacccaccacggaaatggcggcggtcagctcgttattggcattaaaaaccggcgccgccacgcagcgaacgtcgggatagtcttcgccgttatcgaagctccagccgcgggcgcgaatacggcccagttcatcgcgaagctgttgggcgctggtgatggtggttggcgtcgcccgctcccactgcagctcgctgataatcgactcctgaacccgctcgggctgccaggccagcaggcatttaccaatgccggaacgatataacgacaggctcttaccttcatgcgaacgcacgctgatggtggccggggattcaatcttcagaatgtagtaggcgttgccgctgtcgatgatgcccaggtggcagagcagcccgcactgatccatcagctgcgtcaggcgcgggcgcgccagttcgcgcaggtccattttgctcagcgcctgcccggccagctcaaccagcttggtccacaggcagtagttatcctgattatccatgctgaggaagcgctgttttttcagctctcccagcagcagataggcggtgcttttcggaatacccagttcgtcaataatggtcgccgcgctgcaggggccgatgcgggcgatcagattgagaatatcaatggcgcgggtcagcgccgggactttgcttgattccaacatactggactccaatcctgaatactggaatcagtgttgcggttgtcgggcgtgtaaattgtgagcgacttcaaatgacgacgctattccagccgggtggatgttcagagggagaaaaatgcgagatagtacacagaattttttaaagcaagtacaacaggctggactcatcgcgcgccgggaggggctcccgacgcggaggtgggtttacgctgagagagattcgacgacgttaatccagccgtgttcaccggccaccggctggccgttcagccagcggcgcagcatgttgagggccatcatcgcgcacacttcctgacgcacctggaggctgtggcggttggtggtgaatttcacccgcagcgcgtgggtgccgtccggcgtggaaagcgcaaagttcaggtgatcgctctcctgaccactcaccgccagcgccagaccggcaaagtgtttttcgcgccgttccgccgcccagcgcgcagactgcgccagggtctcctcctgcgccggaatgacttcgctggccaacagcggagcgttgacgcgagaaagctgaagcgccagcagacccccggtaaactgctcgctcagcgtcaggcttagctgacgctgctgcaggcgacgggcgatctgcgcaggcaggccttcggtaccttcgaaaatcatgctctctccggccaccttctgcacttccggccacagcgccagcatcgcctcgcgctgttcggcaggcccggtcagcttcagttcgataatcggcatcgaggagcgatagcccatcacgacgcccggcggcagctgcagatggtcgaggctctgcgccagttcgctttcggaacggccgaaggtggtcaggcgcaaacacagcggcgcagcggatagcgggaaacgttcgcgcaggcgcggtaagatttcctgttcaaccatcaccttaaattcggaaggcacgccgggagtgaaaaacatcaggcagcggtttagctgcacggcaaaaccgcaggcggtcccgaccgggttgttgatcatctcggcgctttgcggaatttccgcctgtttacgattgctggcggccatgggtcttccgcgctcggcaaagaaacgggtcatggtttccagccaatcttcgtgcagaattaacccttcgcctttggccgtcgccgcggccagcgcgctcaaatcgtcgctggtcggccccaggccgccgttaacgatcagcacgtcagcgtgttcgctgcgctcgcgtaaaatcgccaccagggagtcgaggtcgtcacccacggtatggcgacgcgttaagggtaatccttgattaaaaaagaaatccgccagccacgcggcattggtgtcgatgatttgcccatgcagcacttcatcgccggtggacagcatttccacgtttaacattgtgaactccagcctgataagtagaaatactatatcgcaaagcggctggtgaaaaagcctgaaaatcaggcgcggcggaataccgcgccggagagattagaagctggcgttgacgccgacgtacggaccgtccgcgaccgcgttatcgcggttgccgtctttacccgccaggttaaggtagcggtaaccggcttcgatgctcagagggcgcataatggtaaagcgcgcgccggcattggcttcctgatagctgtcgataccgctggagagtgaatcgggagagtaatagtattcgccgaacaggcggaagctgtcgccgattttccactgcagaccgccgccaaccgccgccgcgtagccctcatcgccattgttcgggttggtgtaaacgccttttccgcccacggtggccaggaatggccccaggggaatgttcaggcccaatcccagccccgccgcatcgccgtcgtcatcattgtgcagccagttgccggttaccgccaggccggtcgattccgtaccgaatccgacgccaaggttagtgtagtgctcgccggcctgcccgctgacgctgatcgcatttgccgccgtcgagacgaacatcatgccggccagggccataaatatgctttttttcatttttatctatccagaaaataataataagaaaatcccaaaaaaccgcgaaattgtactgctccgttttaaggaatcaatgcgttatagcgcgcttttaccgcgtgattgtaaccagttgcttcgggagccttgttaacggtctcagatatcaattcaatagtcagggtcaaattgctgggtctcagcctttattatacaaataggctccagcttatttcgtcgtcgcaaagagatgaataagttacataaaactttgtcaggagataaagatgagcaaaaaaggattaaccaccgccgccggcgccccggttgtcgataataacaatgtcgtcaccgcaggcccgcgcggcccgatgctgctgcaggatgtctggtttctggaaaaactggcccacttcgaccgtgaggttatcccggaacgccgaatgcacgctaaaggctccggcgcttacggtaaactgaccattacccgcgatatcacccgctatacccgcgcaaaactgtttgccgaaatcggtaaaaccaccgatctgttcctgcgcttctcaaccgtcgccggagaacgcggcgccgctgacgccgagcgcgatattcgcggtttctcgatcaagttttataccgaagaaggcaactgggatctggtgggcaacaatacgcccattttctaccttcgcgacccgctgaagtttcccgaccttaaccacgtcgtgaagcgcgacccgcgcaccaacctgcgtaaccccacctggaaatgggactttttctccctgctgccggaaacgctgcatcagttaacgattgatttcagcgaccgcggccttccgcgttcctatcgccatatgcacggtttcggcagccacgcgttcagctttattaatgccgataacgaacgtttttgggtgaaattccacttcaaatcccagcaggggatcgccaacctgatggatgatgaagcgaaacgactggtggcagaggaccgcgagagttcgcagcgcgatctctatgagtcgattgaaaaaggcgatttcccgcgctggaccttctacgtgcagatcatgccggaagcggacgccagccgggtcccttataaccccttcgatctgaccaaaatctggccgcacgctgattatccgctgatggaagtcggcgtgctggagctcaaccgcaacccggacaactacttcgcagaagttgagcaggtcgcgatgaatccggccaacgtggtgcccgggatcggcttctctccggatcgcatgctgcagggacggctgttctcctacggcgatacccagcgctatcgtctgggcgtcaaccatcatcaaattccggtcaatgcgccgcgctgcccgttccataactaccaccgcgacggcgcgatgcgcgttgacggcaatagcggtaacggcgtcacctatgaacccaacagctttggcgcgtttcaggaacagccggactttagcgagccgcctttaagccttgaaggcgcggcggcccactggaatcatcgggaagataacgactacttcagccagccgcgcaggctgtttgagctgttaagcgaagatgaacatcagcgtatgttccagcgtatcgccaatgatatgcgggatatccctgagtttattcagcagcgacaaattggcctgttcagtgaagtccaccccgactacggcgcgggcgtggctgcggcgctgaaagccttaaagcacggagagtaatgctgatggcagcccttgcggctgccattttacggtttttaaacgcgcttagtgccgaagcttagcgagccgccgcagcgacaaaccggttagctttgcgacctgagagggctcaagcccatcatccagcatcgcctgagcaatgcgttgcgtcgcctcctgctgtccttgatgccggccttcttgtcggccttcattccggccttcctgtcgaccctttcgtaaacctttttctatccccgccttcattccctgaaggaccccctctttacggccacgctcttccagaaaatgagcaatattcatcagcgtctccttatgcggcttgagtggcgtcttttgcgcgagcttgcgtaaaaaggccaccggatcggcggcgttgcccgcctgaagcatataattcagcaaagttttaaactgccgacgcgtagtgtatcccaaggataatatcctgaccagttgctcagaaatgtccatcaaatcccgctggcggatatgtttttgcagcagttccagcatagcgacacggcggtgctgcacaagccgatcgtcaggaatcaccgtgacgtctatcagtggaaaacgctggctatacagccgctcggccacctctggctgagggaaatcatccagccagcgcgtcgagtacgggtaaggagcgatcctgccgtgataaaatagtagaggaataaccagcggcagctgatgatgccctttatcaaggtggcgctgcatggccgcgatggcgtatcgcatcaggcgaaacgccatatgcctgtagggagagctttgatgctctataagaatgtagatgtacccctctccgtgctgggtttttaacgaataaagaatatccgaatggcttgcgcgtaggtcctcttcaataaaactgccggattccagctgcagcgttcgcagatcgcactgttcccgccaatgcttcggcaaatgaatagacaaaaaatcgcgcgccgttgcccgttgggacaaaaggtgtttaaacaccgcatcgtgcggtgagtggcttgctatctgttccatgatggcccctgacccgttaacctacgctcaccctaccaccgcacgcgttcgccgcgcgttttcgcttgcggtttgccgaggcggctcgcaaactgggccttcccgttatttatccctgtcatcagtaaggagaaatcatgcgtcaaaggactatcgtctgcccgctcattcaacatgaaggccactatctgctgtgcaaaatggccgacgatcgcggcgtatttcccggccagtgggcgctctccggcggcggcgttgagccaggcgagcgcattgaagaggcgctgcggcgagaaattcgcgaggagctgggcgaaaaactgcagctgacccagattacgccgtggacctttagcgacgatatccgggttaaaacctacgccgatggccgccgggaagagatttatatgatttacctgatcttcgactgcatcagcgccaatcgcgaagtgacgatcaacgaggagtttcaggactacgcctgggtgaaggcagaagatcttccccactatgatttgaacgcggcgacccgcaggacgctcaccctgaaaggcctactctgaacaagcgcgcaaaaagcgcagcctgaccttcagcccgcccagcgtttcgctacgcagcagctgcggatggctgcggtgcaggcgcgcaatatcgctgaccagcgccagtccgagcccggcgccggggttgtcacccacgttttccagacgatggaacggcatgagcgcctgctgaatctgcgcatcatcgatcccgggcccgctgtcttcgacctccagcagcaccgcctctccgtcacgatgcaggctgaccgtgacgataccgccctgcggcgtatagcgaatcgcgttatccagcagattcgcgcacagctcgctcaacagcacaccatcgccggcaatggtcaccgtcgagggttccccctcatagccgagatcgatagccttgctccgcgcctgctgaagacgcgaaaagcagctgttgtggacgatctcatgcaggtccaccggcgggaacgcgtgctcgccctgctctttccgtttgatggtagccagctgcagcaggcgttcggtaagcagaatcgtactgtcaagcgtgccgctcatcgcctccaggctctctcgccatagccggggatcgccgctcgccagcgccactgaggcctgcgttttcaacaccgctaaaggcgttttgagctgatgcgacgcgtcggcgctaaagcgctcctggcgggagatcatcacccgtaaccggtcgatatagcggttaaaggccacgatcagcagacgggtttccgaccacggcagcagctccggcagcggcgtcagcaggccgggttcgcgccgcaccatgagcgccgaaagccggcgcatcggccgcagcacgcggcgcagcagccagccggtgagcaccagcgtcaacagcactaatagcccctgcgagatccatgatgaaaacagcagctgtcccgccagccagcgccgcgactgcagcgtttcggcgatgtagatttccgccatgccgacaacgccgccttcgttaaccggctgcagcaggcgcgccacgcgaatggcctgaccgcgatattcagtatgataaaaccacgccagcgccggatagagctcggttcgagaggtcgatggcggcatcgatggcaggtcgtcaaaaccggaaatcacccgcttctcgggatcgagcaccttatagtacagccgatcgttcatattcagctcgaagctgtccagaaccacccaggggacattcacctccagcctaccgcggcgaaccaccaggcgttccgccaccgtgcgggcggatgaaagcagcgtgcgatcgtaagcctgggttgccgcctgcagagcgctgacgtagctattgaacgccgacagcccccatagcaaaaccagcggcaggccgagaaacagcaacagttgagcgaataacgactgcggtttaccccacctcatgagcgagctccagcacgtagcccaggccacgcagggtcacgatacgcacgttgctctcctgaagtttcttacgcagacgatggatatacagctcaatgctttccgggctgacgtcatcgttcaggctgaaaacctgttcaaacagctgctggcgcgacaccggccgcgtacggcgaaacatcagcaccgtcagcagcgcctgctcgcgcggcgtcaacgacagcgtttgtccgcagagtaaaaaatagccttcatcgcgatattccagcgcgccgatctgctgaacctcatgcacctggccttcgctacgccgcagcagcgcgcgcagcctcgcatccagctcttcaagctcaaaaggcttcggcaaatagtcatcggcgccgacgttcagccctttaacccgatccgccaccgcgctgcgggcggtgagtagcaagacgggaagggtctgcccgcgctttcgcaggcgctgcaccacctccagaccgtccagtcccggcatgccaatatccagcaccgccagcgcatatttttcgctttgcagcagatgatcggccgcgcgaccatccaatacgcagtccacggcaaacccgccctgcaccagcgctttctccagccagtgagccagctcacggttatcttctgccagtaagagacgcatatcacatcctgaaaagttgctgccgcattgaaagggaaatgaaaggtaattgttttaacaatcacgcaaccgaatagccacatgccggttcacataattaaaaaaacgtctcctgtatctgactgaggaagcttatgaatatgccattcctgcgccgtgctggcgccattgcattatgccttttaaccgcctctgccctggccgccgaggcgccttcccgtaccgaatgtatcgcgcccgccaagcccggcggcggcttcgacctcacctgcaagctgatccaggtcagcctgatggaaaccggcgccatcgaaaaaccgatgcgcgtcacctacatgcccggcggcgtaggcgctgtggcctacaacgcgatcgtcgcccagcgccccggcgaacccggtaccgtagttgccttctccggcggctcgctgctcaacctggcgcagggcaagtttggccgctacggcgtggatgatgtgcgctggctggccagcgtcggcaccgattacggcatgatcgcagtccgcgccgactcgccgtggaaagacctgccgtcgtttatggcggcgatggaaaaaaatcccgccagtatcgtcatcggcgccggcgcctccattggtagccaggactggatgaaagcagcgctgctggcgcaaaaagccaacgtcgatccgcacaaaatgcgctacgtggcgtttgagggcggcggcgaaccggtcaccgcgctgctgggcaatcacgtacaggcggtctccggcgatctcagcgaaatggtgccttatctccagggcaataaaatccgcgtgctggcggtgttcgctaacgaaaggctgccgggtgccctcgccgatgtccccaccgccaaagagcagggctatgacctggtctggccgattattcgcggcttcttcgtgggtccgaaagtcagcgacgccgactatcagtggtgggtggatgagttcacgaaattgcagcagaccgacgcgttcaaaaagcagcgcgagctgcgcggcctgttcgaattcaatatgaacggtaaggaactggacgcctacgttaaacaacaggtggaagcgtatcgcctgcaggcgaaatcctttggcctggccaaataatttacggaggttgcgatgagcgatcgtatttttgccggagtgtggctgctgctctgcgcgggtggaatgtttatcgcctggcaaattcacagcgaatacgcctatgaacccgtcggcccacgccctttcccggtcggcattatcggcctgatgctggcgtgctctgtcttgctgcttctgcgtcggcccgacgccatcacgtggcccgggcgccggattttacaacgtctattaaccatggtggttgcgctggggatctatgcgtggggttttgaatggctgggttttcctctggccaccgcgctgctgaccgccgtgtttggcctgctgtttggcgccaccctgcccgccgccggggtagccggcgtcgcgatgggcatcgcgctgtggtacgtctttgacgccctgcttgatgtcaccctgccgctcggcgtttggttgagttaacggagaaggttatggatatctggatttatttatcgcagggcttcgccgttgccatgacgccgggcaacctgaccatcgcgctaattggctgctttgttggtactatcgtcggtctcctgccgggtctgggcccgattaacggtgtcgcgatcttactgccgctggcctttgctctgcacctgcccgcggaatcagcgctaatcctgctggctacggtctatattggttgtgaatacggcgggcgcatttcgtctatcctgcttaacgtacccggcgatgccgccgccattatgaccgctctcgacggttatccgatggcgcagcagggacgcggcggcgtagcgctgtcgatctctgccgtgagctcctttgttggttcaacgatcgctatcggcgggatcatcctgttcgccccggtgctggcgcagtggtcgctggcgttcggcccggcggaatatttcgccctgatgatttttgccatcgcctgccttggcagcatgatggcggaaaatccgctgaagtcgtttctcgccgcgctaatcggtttggggctggcgacggtgggcgttgatgccaataccggcgtgtaccgcttcacgttcgacagcgttcatctttccgacggcgtgcagtttatcgtggtggtgattggtctcttttcggtttcggagattttgctgatgctggagagcaccagcggcggacagaagctggtacggaaaaccggacgcatgctgtttaacgccaaagaggcgggccagtgcgtgggcgcgaccctgcgctcatcggtggtgggtttctttgtcggcattctgccgggcgcaggggcgaccattgccagcgccatcacctatatgaccgagaaaaagctcagcggcaatagcgctaccttcgggaagggcgatattcgcggcgtcgcggcgccggaagcggcgaataacgcctccgcctgcggctcgtttattccgatgctcacgctcggcgttcccggctccgggactaccgcggtgatgatgggcgccctcaccctctacaacatcacgccgggaccggcaatgtttaccgaacagccggatatcgtctgggggttaattgccgcgctgctcatcgccaacgtgatgctgctgattatgaacattccgctgatcggcctgttcacccgcatgctgacgattccgctatggtttctggccccggccatcgccgccgtgtccgcggtcggcgtctacgcggtgcacagcaccaccttcgacctgctgttgatggttgggctgggcgtgctgggctacattatgcgtaagatgcacttcccgatgtcgccgctgatcttagggtttgtgctgggagagatgctggagcagaacctgcgccgcgcgctgtccatcagcaacggcaacgtggcgattctgtggcaaagcggcgtaacgaaaacgcttctgtttctggccatcgcggtgattgttgtccccccgctgctgcggtactggcggaagcgccagcttaatacgcagggcgacctgccctcttcctgatgctcaacgtcattggcggtcgctcagcgccgccaatgacggtatacgttgaatttccaccacatctgcctgatagttatcgttttaactttctggtgatccgttatgaccgtcgccgcatcccgttcggggttaacattcgccgcgttggcgctggccctgatgcttgtttacaccggtatcagcgcaggggataagctcacctggctgatggaagtgacgccggtgattatcatcgttccgcttttgctggccacgcgctcgcgctatccgctgacgccgctgctttacacgctgattttcttccatgccatcattttgatggtcggcggtatgtacacctacgcgaaagtgcccatcggctttgacgtacaggcgtggctgggactgagccgtaacccctatgacaagctggggcactttttccaggggctggtgccggcgctggcggcgcgggagattctgctgcgcggcggctacgttcacgggcgtaaaatgctcggtttcctggtctgctgtattgcgctggcgattagcgccgtctatgaactgatcgaatggtgggcggcgctggcgctgggacagggcgcggatgagtttctcggcacccagggcgatccctgggatacccagtcggatatgttttgcgccctgctcggcgcgctgaccaccgttttagcgctgggccgctggcatacgaagcagctactgaccgtccagcgcgtctgagtcgggcatcgcctgctggttgacccagtcacgtagcgcccggcgggaaattttaattccgccggttttcagcgattcaggcagccgcagccagcgcaccggctgctgaaaccgcgccagcttatcggcgcaccagcccgccagcgcggacgggtcgtcattctcgccgcactccaccaccgccaccggccgctggccaaactccgcatcatcctgcggcacgatgaaaacttgcgtaatccacggatgagcgccaatcacccgctccacttcttccggctgaataccttctccgccgctaaaaaagaggttgtccactcgtccgaggatagtcagcctgccgtgctccagccggccccgatcgcgagtggcgaaccagccgtcggcattagcgagggggacaatttgcccatcgcgccagtagcctgcggcgatgctgtccgaccgcagccacacttcaccatcgacaatccgcacttcgcgccccggcagcggctgcccgacatccgccaggccgtccgcctccttggcgcataccgtggaggcaaactcggtgaggccgtagccgcaccagcagcgaataccgcgcttaccggcctgctcggttagcgccaccgggatcgccgcgccgccgagcagaaccgctttcaacgacacctcggcgtcgccgctgagcaggcgccagagctgggtcggcaccagagaggcatgggtacagccgcgtaacgcctgttccagcggctgcttgtcgcgtaccgtcaggcctgcgccagctaacaaccagcgccagagaatcccctggccggaaacgtgaaacagcggtagcgacagcagccagtcgtcctgcggcgcaaagggtatcatcgccagcacgccctctgcgctggcaagatgggcgcgaaaagcgtgcaccgccgctttcggtagtcccgtcgaccccgaggttggtgtcatggacgcgatacgatcttctcgccaggcgaccgcgtgcacgccgtcgccggcgcgcaacgctaatggattaagcgccaccggaaggtcgccgccgtttagcaccagcgcgtggcgcagtcccagagacggcagcagttccgccaacagaggagcaggcagctgcggattcagcggcaggacgcgcgcgccacactgcaggagggccagccacgccagcagagcatcgggctggttgtaagcgcgaagcagcacgccatcgccgtcgcgaacgccctgggcgtggaatccccccgccagcgcatcaatttgcgcgcacagttcccgccagcttagccgccgctcgttcaggcgcagcgcctgagcctcttctcgcagccgccgccagtggcgccagggccagtcgctaaaggtcacagcagcggctccagctcatcaacgtgcagacacggcagctcgctttccggccaacggcgcaccagctgggcacgcatcaggctcagcgtgtccagaccggggatcgtgtccggggtcagccaggcggcgattcgcgccagctgcgtcaggccaaggctcgactcaatggcggaactgatgaccgccgtcagccccagggcatgcgcctgcgccacctgctgccgcactttttgcagactgccggtcaacgtcggtttaatcaccaccgcccgcagccccggctcggcggaaaaggtaaagtccgcctcgcgcaggctctcatcccaggcgatagcgatacccgtttgttgggcaaaagcgcgcgaatcatcgcggtttttacagggttcttcgagaaaggcgatgcggctgcgatagtgtggattcacgtatttggcaaactgctgcgctttcagcggcgtccaggcgcgattagcgtcgaggcgtagcgtcagatcgggaatcgcctccagcagcaggttgaccaccatgccgtcgcgcaccgcctcatacaggccgactttgaccttggcgactttttcgccgggcatcagcgaaagcctggcgaacagctcgtccggatcgccggcgcagagcggcgccgcacgatagtccgccgcctgcggcagctcgccgcacagttccgccagtgcgcagctcgccccgaaagccgccgacggcggcgttggcaacgcgccctcttcgccatcgcgccaggcgctcgcccacgccagcagcgcagcctgcgcctcatccagcgtttccaggctgaatccgggcaggggagatatttccccccagccttcgcgctcgccgtcgcgcaggcgcagaagcaaaccatcgcgggtttttaaccgccgttcacgcagcaccactcccgcgtccatcggtagctgccagcggtagacctgcgcctgccgcattacggattccgtttaaatttgctgaagtccggctggcgcttctgattgaaagcgttgcgcccttcctgaccctcttcggtcatgtaaaacagcatggtggcgttacccgccagctcctgcagtcccgcctggccgtcgcagtcggcgttcagcgccgccttcaggcagcgcagcgccatcgggctgttctgcagcatttcccggcaccagcgcacggtctctttttccaggtccgccagcggcaccaccgtattcaccagccccatatccagcgcctgctgcgcgtcgtactggcggcacaggaaccagatctcacgggcttttttctgcccgacgatgcgcgccatataggaggcgccccagccgccgtcgaaagagccgactttcgggccggtctggccgaagatggcgttttccgccgcgatagtcagatcgcacatcatatgcaggacgtggccgccgccgatggagtaccccgccaccatcgccaccaccggtttcgggcaagtgcggatctggcgctgaaaatcgagaacgttgaggtgatgaacgccggaatcatcctggtagccgccgtagtcgccgcggactttctgatcgccgccggcgcaaaacgctttatcgccttcaccggtcagaacgatgacgccaatattgtcgtcatagcgggcatccgccagcgcctgaatcatctctttgacggtcagcgggcggaaagcgttgcgtacctgcgggcggttgatagtaattttggcaatcccgtccgccgatttttggtaacgaatgtcggtgtagccttcggagcagtcctgccattcaatcggggcgtaaagcatggcttcatcaagagagatcataaagtgtccttcggttaactcgctaaaaactgcgccagacaagccacgacagcatcggggttttcccgatgcgcgttgtgtccggcatgattaatcacgtgcgcggtggcggagagttcacccgcgatggcgcgaaacttgccgtcgcgttctccgcaaagataatgaaaagggaaatcgcgcgcccgtaacgacgcgcgcagatcgggttgttccgccagcgagctggcctgcagcatcgccgccaacgctccgccgttattgcggctgcgtagcgcaaccagcgccgcccgctgcgctgcgtccagggaagcgaagaccggctgctgataccagtcggcaaagacctgggtcagcggctcgcggcgaaagcgttcagcccaggcggcatcgctgcgccggcgcagcctacgctggttatcatcccccaggcccggatgccccccctcgacgaccagcccgcagagcccttcgcgcggctggctgacatagaacatcgccacccgtccgccgagggagtatcccaccagccagtacttaagtatgttgtaactattaagcgtattcttaatcaactcgctgacatcggcaaaatggtttacggcgatatgcgccgatccgccgtggccaggcaggtcaatatagagacgcggatacgcgccaaacgcctgccccaccgtgcgccactcatgactatccccggcaaaaccgtgcaaaaagaccagccagggatagcccggcaggccgctttcagccaccgcgtgcagcgtcatagctgactcacctgcgccagcagctgctgaagcgtttgcgtaccgtcggtttcattaaccgccagttcaatcaacgtcgcgccgggtcctcgccaggcaacgtccagcgcctgctccagctcattccagtccgcagggcgatggtaagtcagattgaacatcgccgccgcgtgcgcgaaatggatattctgcggcatcagatagaactggctgcgctgctcctgcggcgtgggcagcagggaaaaaatctgcccgccgttattgttgacgacaatcagcaccagcggcgcggaggcctgatgcagcagggccagcgagttgagatcgtaaagcgccgaaagatcgccgacgatagccagcgtcggacgcgcgctggcgcgctgtaccccggccgccgtcgccagcaggccgtctattccgctggccccgcgattgctgtagaccgggtaacctaccggtagctgcgacagcgcgtcaattaagcgcaccaccaggctgttgccgacaaacagctggccctgttccggcagatagcgccggattcgctgcgccagctgggcttcgccgaaatcctcgctgctggcgaccgccgcctgccatgcctggcgcgaaagctcgggaatgacggtgggccacggctgtcgtttttccgccggatgctgttcaagccagcggtcgatggcgcacaccagccggcgaccgcgatgctgggcgggatccagtcgccccggcaaattatccaccagccagtactcttcgggttcgcaggtggcctgccactgcaaaacgcgtttgctggtcaggctgctgcccagttgaacaacgatttgcgcctgcgccagttcactgaccgccttgccgttgcccagccacaggtcggcgcaggggagcggctgcccggtttgcgagagcacatcgccaatcagcggccagccgagggttttcgcccactcggccaccttgacgccctcttccgcgctcatccgtccggcgaccaccacgccgcgtttctgccgccagaaaaaccagtcgcgctgcttttcactttccagatgcagagagtgacgcagccagggcttgtcgctctgccaccagtcgccgagctgctgctgccactcggcgccggtgtcgtccatatcgccatacagcggttcggcaaacgggcagttaatatgaacgccgccgcagtgtagcgcgccgagcgcctggtcgagggtcgagaccagccagcgggcggagatatcctgcgacggacgcggcagggatagcgtctgcgacgggtgcgaagcaaacatgcccggctggcgaatcgcctgattcgcgccgcagtcaatcagctccggcggccggtcggcggtcagtaaaatgagtttttcaccggtcagcccggcttcaatcagcgccggatagaggttagccgtcgcggtaccggaggtcacaatcaccgccaccggctgaccgctggctttcgccagccctaacgccagatggccgaggccgcgttcgtcaaagtgggtatggtgaatcaatgcgcggttttccgccgccgccagggttaaaggtgtcgagcgcgatccgggcgcaatgcagatatgctgcacgccgtggcgcgtcaatgcttcaaggatcaccgccgcccagcgtcggttaaatgcgcttacagacatgaatttgtccagtatcaaatattgaggctaagtatagataaagcaaactgttgccgttttgatatgcatcgttttctctatacttctgacagcagtaacgaacgcaatcccgcggctttattttcaatttcctgccactcctgctccgggtcggaaccgctgacgatccccgcaccggcgtagagtctgagcgtacgctgttcgattttcgccgaacgcagagaaacgcaaaattcgctttgcgccagcgacagatagccggcggagcctgcataccagccgcgggtaaaaagctcattacgggtgataaaatccagcgcaacccggcgcggtaaaccagcaaccgccgccgtgggctggagctgatgaaggcagcgggcatcgtcaggcttctccagctcggcccaaatacagcgccggagatgctgtactttccgcaaacggacaatctgcggcggcaggacttccagcgcgcgggtctccccttgcatccgctgacagatatcctccaccaccagcatattttcgcgctggttcttatcgtcggccatcagccagttacccaaacgctgcgcctggcgatcgtccgcatgactggcaacggttcccgccagcgcttcggtacgcagcagcgctccgcgacgccgccacagccgttccggcgtagagcccataaaggcctcttgcgcgttaaagaccatcaggaagtggaagcagttaaggttgctgcggcggctggccgccataatcgctccggcgtttaacggagcggcgaagtgcaaatcggtggcgcgagccagcaccactttatccatctcccccgccgctatcgcctgcgtcgcctgcgcaatcagctctctccactgcggataagccgggaaatgctgttcgctcagcagagagggcatcgcggtagcctgcgcctgtttcgccaccagcgaatcgagaaattcacgtgccgcacgggcatcgtcacggagcgaggtctcgctatataacaccaggcgtagcgtggcgctgccgcccagccgacgccactccagcctcggcaagatcaacagaccctgctgaggatgaaaggcgttaaggccgcaaattcgcaaatcttcacgcccctgctggcgcaaaaaagcgtgcgcctgctcaagggaagcaaagatttgcaccgcccccagcgcggccagctcttcatcgccgctgcgctgctgccagtagaactgcggccactgcggctgatgcgtgcaccacagaaggggatcaaatgcgtcattcagcgcgaaggggacatcgaaaattcgcgtgccgggcaagggcgggaacgcttcatccaggcagcgatacaggctttccagcgcggtggatacagacagcacgcaaacctccacggagtaaaaaccccacattatacggggtactactgaggaatagcagtacccacgatgagggagcggtttttaattagcgcggcggttagtgggtggcgatttcgaacgccatgccgatatggtcgatgccgtcctcgtcgtaaacctcggtcaccggcacaaaaccgaagctggcgtagaatttttgcaggtgcgcctgggcgccaagatagatagccttttgcggccagtgttgccggcagctggccagcgcctgttccatcagctgatagcccagcttctcgccgcgtaccgcctggctgacaatcacccggccaatcaccaccggttcaaactcatcatcgctcttgagaatgcgcgcgtaggctaccagctcatcgccgcgccagccgagaagatggcgattctcccccaccagatcgtcgccgtcgacgtcctgataggcgcaggtttgttcgacaacgaacaccgcacagcgtaatttcagcacggcgtagagctgtgggacggtcagttcaccgtggtgaagatcctgccatgtaatcatctgcgcttccttaattaattttaaccctaaataattcaagtggcatgaaggcggccagcgagcgaatcccctggagcttacatgagtaagtgactggggtgaacgagtgcagccaacacacatgcaacttgaagtatgacgggtatactttgttttttgactcacgccctgaggacactggacgatggaattactctttttggggacatccgctggcgtgcctacccgtacgcgtaatatgacgtcgatagtgctgaatttgcaacagccaacaatggctgagatgtggctgttcgactgcggggagggaactcagcatcagtttctgcgcaccccttaccatcccggcaagctgaataagatttttattacgcatttacatggcgatcatctcttcggtctccccggcctgctgtgcagccgctcgatgcagggtaattctctgccgctgacgctgtacggaccgaaaggacttaaagcgttcgtggaaaccgcgctgcgcctcagcggttcctggaccgattacccgctgacgattatcgaagtcgggccgggactggtgctcgatgaagccggcttccgggtcaccgcctggccgctcaaccacccggtcgaatgctacggctatcgtatcgaacagcatgataagccgggcacccttgacgccgcgcagcttatcgccgaaggcgtgcctcccggtccgttatttcagcgcttaaaacagggattaacggttgagctggaagatggaaggcggattgacggcagccgctaccttggcccggcaacgccgggtaagaagctggctattttcggcgataccgccccctgcgaggcggcgcgggagctggcctgcggcgtggatgtcatggttcacgaggtgacgctcgaacaggcgatggcggaaaaagcgaacagccgcgggcattcaaccagccagcaaacggcggcgctggcgcgcgacgcgggcgtcggcacgcttatcgccacccactttagctctcgctatgacgctgaaggctgccagcgtctgctggcagagtgcagagagatatttccgtctaccgtgctggcagaagatttcatggcgtatagcgtagaataaaaaagcggcgtaccgcggcagagagacgccgcgaatacgccagccattactcttcagcgtagctgttataacgcagaatagattttaaattgcgatagcccaggtaatcctggatcgagtcgtcatcaattcctttttttcccagctcatagccgcacgcgtggcgcagcatcctgggatgaatattttgcttcagcttcgccagctcgcagcactcgcgaataatttgataaaaacgctggcgcgtcatctgattgccccgggaagagataaacagcaaatcgttatgagccgggtaacactctctggccagtagccagcgctgtaatgagataatttctttgggttgtaagggatgatacccagagataccgtgacgcgcccggcgaatataaacccgttttcgcgacaggtcgacatcccgcaaggtcaaggcggtaatttcgttaatccgacaaccgtgcaaaaaacacatctggatcatgcagctatttctttccgggtgcgcacaataatgtgcagcaagtaccagacgctcaacgtccttgacgctaagatattccgtatctacctgcatacgttattccttttcatccatttgactataaaattactgataggtaaatgtcagctgtacaatagactcaaatttacccaccgttgctccaccccgggttgaatataaacgggcagccagcgggaatacgcctttcccggtactgccgtcgatagcaatactcatctggtcctgatttttataaagagtagagtgatcgctactggtgatttgcagtgcgatattctgcgccgcatcgctggcggccatattggcaaaatgtctggcatcatcaacgtcgataacgccgtcaaattttaccgttgcttttgttgtccccgccgggcagttttcgacattcaggtaaaaggatttccactctgaagcgttgccggccgtttgaaagtcaatattcaggagcgggccaaaattaacctcttgatacttcgtgtcggtactgacgtcacaggggagataataaatattgccggtaatattcaaagggatcccgcccgaggatgaaaaaacaggcagcaataatgccagccatagcgcctttttcattatctactcctgctattcaatttctgcctgaatggttgccgtagcggtaaagcctccgccgctgggtaaattcccggtggtattaatcggataaattttcatagtggtgtccccggtctgactcgggtaattaaaattgaccggcagcagacctgaaatgaccggtattttgacgccggtaatattttcaatacgcaccgcaatgtcgcgattggtggtcgccagcgcagtgctatcgttagtatccgccatcccctggaacgacagcgcgatttttaccccggcggaaatattggtacaggccacagtcatattaacaacatgcggaacgaagtccttcggcatctggcccgcggttttaaaatggttggcggcaatatcctcaaaatcaatattaatcgctttaccggtattaatctcacaggactgtggaaccgttaccgacccgctcattgaaatttgcgtcagggggataccactgtagctgccggtttttcgcgtcccgtagacactcaggataactgtcggagggatcgtcacctggcctacaaaaggccgggtaaaataaagcgaaatatatcccagtgaccctgtatcaaaaatggcgccgccgggattacaggcaaaaccttgattattctgattactcttatcctcaatcggcgtaggaatatatttattaacacccccggcaataaataactcggtggcaatttccaggtatttatttagctggtaataatttaatccattgcggctttgcgtcgcggtaaggcctggcaccgtggctttaaaatacgtcaccccgctggcgctatcacaatcacactttgccttgtaggttcccccggtactccagcggtacaaacggggaaactccattccggcctgattttgtgagggattagtaaagctttcaataaatgaaaagctatcctgaaaaggcgccccgccattaccggtattctgacaccacccggttgccgccatcgcctgcggcgcgatcgccagcaccgccaggcccgctaatattccccatgaaaatcgtttcattgtctctgcatcctttcgattatcggcattgcgcctgggccacaataatgccggtaagttcttttgctgacggcagcgcatagtggatctggcagcgttcttgcgccccggagccccacttcacgttgagtacgccgttagattccagtccggtcaggtagacctgcccgccatcgccaacgataaacgcctgctcagaggatgccgccccggggacgctgaccatggctccgaaaggcaggggttgcccgttctcctggcgtaccgtcatcagtacccggttacccacgctggtggcataatttgcgcgaaccaccgccccacgggttggtacgaccgtctgcgtcgccaactcaaggtcgacatcgtccggcatcgtcgtggtatcgagcgtcaggatattcttacgatacggcgaggcgtaaggcactacggtatagcctcgccagtcggttctgacccctgtctggctattcacgccgacgccggcggcgccgggcgccttgatgagagcgacggtttcgccgaaaggctggcccagcgtcaggccgttttcatgtaccagcgctccgccgcgcagggcgtagttcagccgatggctgtatttatcatggctgtagccgccggtaagttcagcataggttgcacgccagtccgcattgacgctgccgctctcccctcttccctggctggtgtagccttcctgcacgctccagctcaggttattacgctccagcaaggtgccggagaggcccagattgttgctggtggagccatttttgctgctgttcagggagtagttggcataaaccggcttcggtagccattcccccaaaggcacgctgatgctcagtgcaaagaggtgatcttcgtcattacgcttaccggtgttctggtcggtagtattgcggttatagctgtagttcatgctatagctgatgccgcgccagctgttgttgtatccgacgcccactgactccatggtgcggctggtattccagtagtcctcgcggatatagctcagcgacagcgatcccatttcttcgccaaggctttggctgatcgttacctccccgcggttgcgccgccgttcaatagaaggcgtgtagttgtcatcccgataggtatccagcacttcctgcatatcccagtaaccgctggtcgcatagcgatagcctgccaggcttacgttagttcccagacccgggagatctttgctgtaacggagacgtaccgactgcccgctctctttatctttatcctgtcgggtcgaccaggcctggatgatatcggtcgatacggcgcccagttcaccgaggtttttccccattcccagcgccaccgactgatatttactgctaaactggccgccgccgtacagggttaacccccagggcaagccgtaaattgccgtcgcctgcgtgaggggcgtttcgtcaatgctgttgtcataggcgcgatacacgccggaggtcacgctatatttcagacgcccttcgcgctgcaggacagggagagaagcgtaaggtacgatcaggttctgctcgctgccgtccgcctctttgatggtgacggctaaatcacccgagccgccggtcgggtacatatcggtaatttcaaaagcgccaggcgcgacgtaggtctggtaaatctcatagccgttctggcgaataatgacctgagcattagtgcgcgcaatcccgcgaacgacgggcgcgtagccgcgcaggctttccggcagcatatcgtcatcggaagccagcatcgccccgcggaagggaacgccctcaaaaacgtcggcgtccgtgctgctatcgcccagcgtcatcaccccctgtatcgatttgatgttgcgctgcgcataggtataaaccgtgtcccaactattactggactctcccccgctgctgctgcgcgaccaggtcgtgtagttacgtaaacgccacggcccgacgttgataccggggcgcaggttaacgtattggttatcgctgtccggcgcatcgttctgacgtgaccagttatttgccccgctaaaggagtaattcagcaggatcgccggcaccccctcatcccactgtttcggatccacccagccgcgggcggcgctggctaccgccgcctgcgggaagctcaatagcaggcgctgctggctgaagcgaaaatcggattttgcctgcggtatcacgctgatatccgcgcagccgggcgttctgcggcccagctctggaaattgggagacgcgcacgccccattcggccagatcgtctaccgtcaggcaaggctgtaattccgttattcctggtcctttgctctgctgaaaaaccacatcgcgggtgtccataaaaacgttattaagataaatatctacccggtaggtccccggcagctgtccgccagcctgctcgtaagcggataaatccctgacgcccgtatgagggccgtccatttccaacagggccgggttaaaaacctcccgcgccaggacatcttcacacagcggtagcagcgcaacggccagagcgccggctatccggttaagccgccatttattatgattatttttcattttccctggaactccctggcctgaaagcctttacaaattcgcgtggtgcagcgcgccggtaccgccataatcgttaatcagtttccactgcaaagcgcccgcgctgacgcccggcagttgaaagcgcgccgtttcccccggccccacccaattggcctctttaacttcggcgccccccactttgacctcggcaaaattcatataaaaggcggtgggattcatgacctgtagcgtattgccgctgcgcgtccagcgaagctgctccgtcaccatctccggcgttccctcaacggatttaggtcgataaattaatttgatgcgcgttttgatagcgatctgtagagtattggcgccggctttagcctgcgaggagggaatcgctttaatgttcatccagaacatactttctttattttccggtaagccgccgctgtaaattacccgcagtcgggtttgctgctcgccctcaaggcgaaataaaggcggcgttaacagaaaaggggctgcgcccttattactttcaacccagctttgaatgagataaggcgtagcatcattattggttacgctcagtgaggactcttttttaccgccgggataaatcagacgagtaccgccggtcaccacgcccgcatgcgccgcagcgccgaccaacagccatccagctattagcactttcaggtatttttgcatctccagctccctggaaaagcgagccacatagggctcgctaacactgtcatatagacggaaaattagttatagctgatggtaaagttggctgtaccgtcagctttacccgcaacgatagtgctttcagtctggatataacggacgcggaacggcagatcgatattgccggtagcggggatggtcaggctggcagaacgcgtatagagcggcagcgtcgcgttgctgctggcgtcaaccagctgcagggccacgccttcggcaacggcaggatcggtacccgctccggtcagctgcagtttatcattatcaccgttgacgttagcgccggagaacagtaccgatgctttggtgacggtagtcgggcagttttccagtttaatcgcgaaattctgttcagccgcagtagaccccgtaccgctaaacgcggtcttggcaatctgccccatctgaacttccagcgggttggacaggtcgttcaccacgtcgcagcccgcatcgatgatatcgccgataaacttcacctgaccgtcatccgccagcgcagcaccagagaacgccgcgcaaccggcgacaacagcagcaagtaatgtttttttcatgatttatccttttcaatgcagtcgatgcattaacttataagcgcaataccctgcgcatccttttatttacgtttgatattaataacgcaacaaaacattgacccatgaaatggatataatattttgaagtggtcattatgtatcaatatgaccacttcaattaattagaatataaattgccagggaaggcgtttttgatttcatatttatcaggaaaaatcccaataaacacgataaaaagctaaagaatgagaggcggaacaaaccatacataaagccaattaaaacaattaaaaaataaatgacacctatacttaatataactatatgaaaataatagtaaaaaatattgttaatcataaattgacattgttactacctgtggatagcataggagtcagtttgatacaaaatgactattccgtttaccaaacttctctaaacctcgcatcattactggctgtatagataaccgtgtgctgaatattccgatgtcccagaaagtcctgaattaatcgcgtatccacccccttattagccagcgcgaaaccgcatgcgtggcgcagcatatgcggatgcgcgttaatttccagctgggcgacgaggctcaggttcttcatcatctggtatattctctgccgggataaaggctggccatttcgtgacagaaagagccagccagaattatttccgggataattattacgcacgcgcagccattcgttgagtacttttacctcttgtttataaataggatgagtggttgaaaagccgttcttcagtcgacgaatataaatgaccccgctttgaatatcgatatcagagagcttccagtgacgaatttcgctcactcgacaaccatgattaaaacacatccacagtaaacagacatcgcgctccgggtttgctccccgcctggccgcttcaaccaaacgctgaacctccccgacagtcaaatgcttacgtcttgttttcattcactttctccatctacaaaacacaatagcgtgcgtagtaataatagtacggaaaataagaggatgagtggaaacgtaaagtgagattaatatgataaaaagcatgaataatacgaaaaagagtaaagaaagcgcctggcgcctttgcgtagataaaaaaaggaccgccgaagcgatccttttctctggctaaagatagcattacatcagcggcgtagccaattgtacgatgctgatgagcggctgcggccaaacgcccagcaccagcaccagcagcgcggagatgagcaccacgatgcctccggcactgtactgccagttagacggcgcatcgcgattcagtttctccggcgcgctcagatagaggctcaccgccacgcgcaggtagtagtagaggccaatcgctgaacccaccactaccgcgccgaccagccaccacaggtgcgcatgcacgcccaccgccagcacgtagaacttaccgataaagcccagcgtcatcggaataccggcaagagacagcatcatcaccgtcattaccgccgacagaatcggacgatgccagaacaggccgcggtaggagtagagcgaatcggcatccgggccgcggtacgggctggacatcaggctcaccacgccgaacgcgccgaggctgctgaacaggtaccctgccagataaacgcccaccgcttccatcgacatctcaccgctctgcagagcaatcagcgccaccagcagatagccaaggtgagaaatggaagagtagccgagcagacgtttaatattggtctggctcagggccatcaggttcccgaagataatcgaagcaaaggcgatcaggcccagcaccacgcgtaccgcctcgctgtcgcccaccggcatatagaggaacaggcgcatgaccacgccaaagatggcgattttactggcggtcgccaggaaggtggaaaccggagcaggcgcgccctggtatacgtccggcgtccacagatggaacggcaccagcgacagcttaaagccgagaccgacaatcatcagaccgagaccagccagcagcagcggctcgtgcagcataccatccgtcaggctcttaccgagcgcaaggaaggagaggttaccggagttggcatacaccagcgccataccgaacagcaggaacgaagaggcaacggcggacagaatcgtatatttgatactggcttccagcgaacgtttctggcggaaggcgtagcccaccaggccgaacagcggcagcgaaatcagttcgatgccgaggaacagcgccgccagatggttagcgcccgccagcagaatgccgcccagcgcggcgatcagcaccagaagatagaactcttctttgttgtccttgtaaccctcaagccacgggtaggcgaaagtacaggtggcgaggctcgccagcagcaccagcccggtatagagcatcgcgtaaccgtcaacgcgaatcagcggcgtgacgtccatcgctccgttctgacccacgaaccagagtgatatcagcgcggcgttcaggccgagaaccgacagcgtggcattgaggaaatgattgcgtcgccacgcaatggagagcatcacaaccaccaccgtcaagccgacgatcagcagcggtagcagtgcgatcagttgttgtggagttattgtcatggcgaattacggccttgtagtagaaacagaattaacaaaccactgctgaatgttgctcatcgcagagtgcgaggtgtccagaatcggctgcgggaagaagcccagcagcaccagcagaacgaccagcagcaggatgatcgacagttcacgcagggacattcccggcaacgctttcgcggcgatttcgctttttgctttaccaaagtacgcgcgatgcagcatcgacagcgagtacacggaagcgaacaccagaccaaaggtcgaaataacggtaatcaccggcacggttttatagctgccgaacagaatcataaattcaccgacgaagttaccggtacccggcatcccgagggtcgcgaccgcaaaaaacatcgacagcgcgggtagccacttgatcttgctccacagaccgcccatctgacgcatatcgcgcgtatgcagtctctcgtaaagctgaccgcaaagaataaacaggccggcagcggacagaccgtgagcaatcatctgaatcaccgcgccctgataagccagctggctgccggtgtagatagcaatcagcacgaagcccatgtgggaaacggaggtgtatgcaatcagacgcttgatatcgtactggctaaaggccatccacgcgccgtagaagataccgatgacgcccagccacatcgcgatgggggcaaattcggcggaagcgttcggaaacagcggcagcgcaaaacgcagcaggccgtaggccgcggttttcaacaggatccccgcgaggtcaacggaacccgcggtcggcgcctgagagtgcgcatccggcagccagccgtgcagcggaaccaccggcatttttaccgcgaaagcgataaagaagcccagcatcagcaggtattccacgccgtgggacatcggcgtcttcagcagctcttcatagttgaaggtccatacgccggtagcgttgaagtgcacaaacgccagcgccaggatggatatcagcatcaccaggccgctcgcctgggtataaatgaagaacttggttgccgccgtgatacgcgttttaccgtcggaagccttatggccccacagcgcgatcaggaagtacatcggcaccagcatcatttcccagaagaagaagaacaggaacaggtcgatagccaggaatacgccgatcacgccgcccaggatccacatcaggttaagatggaaaaaaccctgatatttctcgatttcgcgccatgaacagagcaccgccagcacgcccagcagcccggtcagcaccaccatcagcagcgacagaccgtcgatagccagatgaatgctaatcccgaatcgcgggatccacggcatcacgaattccgactgccactgcggaataccggtagattgcgtgagagaatagccgccctgcatccacaactgcaggccaagcagaaacgtcaatcccatagtgatcagcgcgatccagcgcggcatcttcacgccaaagcgttcagtctgccagcacaggaagccgccgatgaagggaattaatattagccagggtaataacatggcgatctttattccttgttaaagtcccgttcaggaccgattttcaacgaattctcacagaaaattcacttcggattgcgggtgttattgcccggcagcgctatgcttgccgggcctactgcttgtaagtcgggttaaccgacaacgcccacaatcctcaaactcaacgcaataccatcagcagcgccagcaccacgacagcgccgatgcccatagaagccacataccagcgcagatagccattctcgctcaccaccaggcctttgcctgcgaagcgggaaaggatcgccggaatgttcatcagggcattcagcggatcgctcttcagcagccacgccacgccgaggaacggcttaacgaacaccttgtcatacagccagtcaaagccccaggcgttgtaccaccaggtaccgagcagacgacccggcgcgctgttggcaatcgacgtcaccagcgtgcgtttacccagccacagccaggcggcaatcagaataccggcgatagcaatcaccccggaggcaatttccagcgtcatgacgcgtccgtgatcaagctcggtggtctgcggcagtacgccttccagcggcggcacaatcagcgcgccaacgaaggtcgagagcaccagcagcacaatcagcggcagatgatgggtaatccccttccctgcgtgagcgtgaatttgttctttgccgtggaacacgatgaaaatcatacggaaggtgtacagggaagtcataaacgccccgaccaggccggcaaccatcagattcagatgaccgttcgccatcgcgcccgccagaatctcatccttactgaagaagcctgccgtcaccagcggcagcgcggacagcgccgcgccccccaccaggaagcagacgtataccagcggaatagacttacgcaggccgcccatcttgaagatattctgttcgtggtggcaggccagaatcaccgaaccggacgacaggaacagcagcgctttaaagaacgcatgggtcatcagatggaaaatcgccgcatcccacgcctgcacgccgagcgcgaggaacatgtagccaatctggctcatggtggaatacgcgagcacgcgtttgatatcggtctgcaccagcgcggcgaagcctgccagcaccagcgttaccgctccgacaatacccaccagatgcagaatttccggggtcatcaggaacaggccatgggtacgcgcaatcaggtagacgccggcggtcaccatggtggcagcgtggatcagcgcggagaccggggttgggccggccatcgcgtccgcaagccaggtctgcaacggcagctgcgcggatttacccaccgcgccgcccagcagcatcagggttgcccaccacagcatgttattaccggcttcgaagtgcgcaggcgccagttcaaccatttcgcggaagttcagggtgcccagctcgttgtagagaatgaacagcgcgaacgccaggaacacgtcgccgacgcgggtcaccacaaaggctttcatcgccgccgcgccgttctttggatcggtgtaatagaagccgatcagcagataggagcacaggcccacgccttcccagccgagatacatcagcagcaggttatcagcgagcaccagaaccaccatgctggcgataaacaggttggtataggcgaagaagcgggagtagccctcttcgccgcgcatgtaccaggaggcgaacatatggatcaggaagccgacgccggtcaccacggacagcatggtcagagagagaccgtccagcaccaggttgaagccgacgttgaagtcgcccaccgacatccaggtccacagcggcacgctgaccgcctgtttgccgttggcgaagaagtcaacgccgacaaacgccgtgaccagcgccgccaggcctaccgagcctacccctacggtggcggataagttttccgaccagcggccgcgagagaaggccagcaaaacaaagccaatcaatggcaaaagaatggttaaggcaagcatgttcatccgcgcaactcacttactgaatcgatgttcaggttctggcgacgacgatggagctgcagcagcagcgccaggccgatactcgcttccgcggcggcgagggtgatggcgaggatatacattatctggccatcggtctggccccagtagctccctgcaaccacgaaagccagcgccgcggcattgatcatgatctccaggctaatcagcataaacagcagattgcggcggatgaccagccccgtcaggccgaggacaaacaggacagaggcgaggatcagtccatgtgttaaggggatcatgcgtgttcctccgtttttcttttatcgctgtcgttcggacggttgctcagcacttccccgacgcgctcttcacggccgatatggaaggcaacaaccaggcccgcgagcagcagcatggaggccagctccaccgccagaacgtacggaccaaacagcgcaataccgacctctttggcgttaatcgccgcgccgtcgataccctgatcgttaatgccgaggatggcgtaaacgataaccaccagcagtaccgctgcgagaatggccggaccgatccagatcccaggtttcagccactggcgctcctgctcgatttcgctgccgcccaggttgagcatcatcaccacgaacacgaacagcaccatgatggccccggcgtagacgataatttccagcgcaccggcgaaataagcccctaaggagaagaacaccccggcgatcgccaacagcgaaatgatcaggtacagcagcgcgtgcaccggattggtgtgggtgatcacccgcagggttgcgaggatggctatcaggccacagatataaaaagcgaattccattgccctctccttacggtaacaggctcttgacgtcgataggcttagcttcgttctctgcttcgcccttatctttgccgtcgattgccatacccgccatccggtagaagttatattccgggtatttacccggaccggaaatcagcagatcctctttttcgtacaccagatcctgacgtttgtattcgcccagctcaaagtccggggtcaactgaatcgccgtggtcgggcacgcttcttcgcacaggccgcagaaaatgcagcgcgagaagttgatgcggaaaaactccgggtaccagcggccgtctttggtctccgctttttgcagagagatacagcctaccggacaggctaccgcacacaggttacaggcaacgcagcgctcttcgccgtccggatcgcgcgtcagcacgatgcggccacggtagcgcggcggcagatataccggctcttccgggtacatccgagtttcacgtttggcaaaggcgtgcatcccgatcatgcagatactgcggacctgggtgccaaaccctaccaataattcttttaaggtcatggtcaattcaccccttattgcgcctgccagagaatgacagccgccgttaccaacaagttgatcagcgttaacggcaggcataccttccagccaaaggacattacctggtcatagcgcggacgcggtaatgatgcgcggatcaaaatgaacatcatcataaagaacgcggttttcagcgcgaaccagatgaaaggaggtaaccatgggccattccagccgccgaagaacagcgtcacaatcagcgccgatacggtaacaatcccgatatattcaccgacgaagaacagaccgaacttcatgccggagtattcgatgtgataaccgtcagccagctcctgttccgcttccggttggtcaaacgggtgacggtgacataccgctacgcccgcgatcgcaaaggtcacgaagccgaagaactgagggatgacgttccacagatgcgcctggttgttgacgatatcggtcatgttgaatgaaccggcctgcgccaccacgcccatcagggaaagcccgaggaacacttcgtagctcagggtctgggcagaagcacgcatcgcgccaagcagcgagtatttgttgttgctcgaccagccggcgaacagcaccgcatagaccgccagacctgccatcatcaggaagaacaggatcccgatgttcagatcggccaccacccacgtcgggctgaccggcacaatggcgaaggccagcagcagcgaagtaaaggcgatcaccggcgccagagtaaagatcacgcgatccgagaagcgcggaacccagtcctctttaaagaacattttgatcatgtcggcgacgagctgcagcgaaccgccccagcccacgcggttaggcccgtaacggttctggaacaggcccagcagacgacgttcgccaaagctcataaacgcgccgcaggtcaccaccaccagcagaatcactaccgccttaaggatgcctaacagaatgtcgatgagatcgggagttaaccaactcatgctttcgcctcctgcagagtatcaatacgcgctccggtcagcaccggcgcaatccctggcatgcccatcggtaagccaacctgccctgccgtcagccccgccgagattaccagcggcaggctaagcgcctggccatcaacgctgaaggaaaccatcgccccttcgttcacgccaagcttcgcggcatctgccgggttcagcttaacgtacggctgcggcatgcggctctggaataccggagcacgctgcgacagctcgtcgctgccgaacagatggtagtaaggcgcgatacgccatttcccttcttcagcctggaagcttgccggtaccgcggtaaagtactcaagaccgctggcggaggcttcaatcagacgcacgcccggatcgccgtggcgcagtttaccgcccacttcatcctggaacttgttccacgcctgcggggagttccagcccggagcccacgcaaagggaacttgcgagcgcggcgcggacggctggttgttcccttccatggagaaggcaaacatggtgtctttatcctgcggctgacggggttcatgcacgctgatgttggcgcgcatcgccgtacgaccgctatagcggtgcggttcacgggccagcttctgaccgcgaatgcggaaggtcgcatccggcgcggcgtctttgataccggccagctgcggtagcgcggcaatggcggcgtcaatcacgtggtccagctgcgtccagtcaacctggcggttgttaacggtgctgtgcaatgagtgcagccagcgccagctttccagcatcacggttttcgcatcgtagtaggccgggtcgtaaacctggaagaagcgctgggcgcgaccttcgttgttgaccacggtaccgtcgctttccgcgaagcttgccgcggagagcaccagatgcgctttttccataatcgccgtacgctgatggtcaaccaccatgaccagcggcgctttcgccagcgccgcgtcaacgcgggcggctgaagcgtggcggtgcaggtcgttttccagcacgataaccgcatcggcgttaccggtctccagttcactcagcgcctcttcaagcgagccgcctccgatcatcccgaggcctacgctgttcactgcccgggcaaccatggtcacgccaacgtcagcaccgcggcctttcagggctttcgccacgttggcggcggcctgaattacctcgatgctgccggcgttggttccggaaacaatcagcggttttttcgctccggctaacgcctgaacgatcacgtcgattttgcctttcagctcgctgctcagcccttcgaccgccggcgcgctatcgtccagcgcgtgggcgatggcgaagccaagacgcgcctgatcttccaccggcgcgcggtaggtccatgcggcgatatcatcaagacgcgtgtcgtcgatattggtcacgaacagcggatgcttcgcgcgctggccgatgttaaggatcgcggcgatctgccagtcggcgactttctgcgccgccgccatttcacgcgctttgcctttcaccgcctgacgcaccgccagcgcgatacgcgcgccggtctgggtgatgtcctcaccgaggatcagcaccgcatcgtaggattcgatctcgcgcagcgccggggtatgaataccgccttcgcgcagcactttcagcatcatctgcaggcgcgcctgttcgcccttggcgatgccggtatagaagttttcggcgccgaccagctcgcgcagcgcaaagttgctttcaatgctggcgcgcggggagccgataccaatcaccttcttcgactggcgcagaatatctgccgccccctgcatcgcctgttcggcgttgagggcgatcagatcgtcgccgcggcgctgaaccggctgacgcggacgatctttcagattgacatagccatagccgaaacgaccgcggtcgcagaggaagtagcggttaacggtaccgttataacggttttcgatacgacgcagttcgccgtagcgctcgccggggctgatgttacagccgatggaacactgctggcagatgcttggcgcaaactgcatgtcccacttacggttatagcgctcggagtgcgttttatcggtaaagacgccggtcggacagacttccaccaggttaccggagaactcgctttccagcgtaccgtcttccggacggccaaagtagacgttgtcgtgagcgccgtagacgcccaggtcggtaccgtcggcatagtctttgtagtagcgaacgcagcggtagcaggcgatgcagcggttcatttcgtgagagatgaacggccccagatcctggttgcggtgggtacgcttggtaaagcggtagcgacggaagctatgaccggtcattacggtcatatcctgtaagtggcagttgccgccctcttcgcacaccggacagtcgtgcgggtggttggtcatcagccactcaactacgctttcgcggaactgcttcgcttctgcgtcgtcgatggaaataaaagtgccgtcggatgccggtgtcatacaggacatcaccaggcggccacgcgtgtcttccgcgttctgatattgcttcaccgcacactggcggcaagcaccaacgcttcccagcgccggatgccagcaaaagtaaggaatatcaaggcccaaagagagacaagcttctagcaggttgtccgctccgttgacctcgtactctttgccgtctacatgaatcgtagccattagcgtgcttccaaaataaaaaacctttagattaccagcgcgtcttaagcaggttcggctgaatcccgttgattgcatgggtattgctgaactgctgtttaatgccagcttcgaattcttcgcggaaatatttaatcgcgctctgtagcggctcaaccgcacccggcgcgtgcgcgcagaaggttttacccggaccgaggaatcgacacagttgctcaagcgtctcgatatcccccggctggccttcgccgcgctcgagagcgcgcagaattttcacgctccacggcagaccgtcacggcaaggcgtacaccagccgcaggactcacgggcaaagaactcttccaggttgcgtaccagcggcaccatgccgatctcatggtcaaccgccatcgccagcgcggtgcccagacggcttcccgctttaccaatgctttcgaactccatcggtaggtcgagatgcgcttcggtcaggaagtcggtgcccgcgccgcccggctgccaggctttgaacttcaggccatcgcgcatgccgcccgcgtactcttcgaggatctcgcgcgcggtggtgccgaacggcagctcccagacgcccgggttcttcacgcggccggagaaacccatcagcttggtgccggcgtctttactggtcgaaatgttctgataccactcgacgccgttggccagaatcgccggaacgttgcatagggtttcaacgttgtttacgcaggtcggtttgccccagacgccggagctagccgggaacggcggcttcgaacgtgggttggcgcggcggccttcgagggagttaatcagcgcggtttcttcgccgcagatatagcgccctgccccggtgtgcacaaacagttcgaagtcaaaaccggtgccaaggatatttttacccaacaggcccgcttcggtcgcttcggcaatggcccggcgcagatgctgcgccgcttcgatatattcgccgcgcaggaagatatagccgcgccaggctttcagcgcgaacgcggagatcagcatgccttccaccagcaggtgcggcagctgttccatcagcaggcggtctttataggtgcccggctccatttcatcggcgttacacagcaggtaacggatgttcatggactcgtctttcggcatcaggctccacttcagaccggtggaaaagcccgcgccgccgcgccccttcaggccggcgtcttttaccgcagtgacgatttcatccggcgccatgccggagagcgctttacgcgccccggcgtagccgtttttactctggtattcatccagccataccggctgtttgtcgtcgcgcagacgccaggttaacggatgggtttcggcagtacgaataatggttttcatttataccgctccaggaggtcaggaatcgcttccggcgtcagataactgtgagtgtcctcatcaatcatcatggtcggccccttgtcgcagttgcccaggcagcaggtcggcagcagagtgaagcggccatcaaaggtggtttgacccggtttgatatccagcttcttctcaatcgccgactgaatgccctggaacccggtgatgtggcacaccacgctgtcgcagtagcgaatcacgtgacgacccaccggctggcggaaaatctggctgtagaaggtcgcaacgccttctacgtcgctggccgggatccccagcacatcggcgatagcgtagattgcgccgtccggcacccagccgcgctgcttctgaacgatcttcagcgcttcaatggacgccgcacgcgggtcttcgtagtggtgcttctcgtgctcaatcgcctcacgctctgccgcactcagctcaaaagcctcggtttgtggttgttgattctcgtgcataattagcggtccacgtctgacataacaaaatcgatactacccagatagacaatcaggtcggagaccagactgccgcgaatagcggccgggatctgctgcaggtgcgcgaagcttggcgtgcgcacgcgggtacggtagctcatggtgctgccgtcgctggtcaggtagtaactgttaatacccttggtcgcttcaatcatctggaaggattcttgcgccggcatgaccgggccccaggaaacctgcaggaagtgcgtaatcagggtttcgatatgctgcagcgtgcgctcttttggcggtggcgtcgtcagcggatgatccgccttgaacgggccttccggcatgttatcgaggcactgctgaagaatgcgcaggctctggcgcagctcttccactttcagcatcacgcgggtgtagcagtcggagacgccaccgccggtcgggatctcaaagtcgaagttttcatagccagaatagggacgccatttacgtacgtcgaagccgatgccggtcgcgcgcaggcccgcgccggtggtgccccactccagcgcctctttcgcgttgtaggcggcaacccctttcgaacgaccgatgaggatggtgttgcgcagcgcggctttctcataggaatccagacgcttcggcatccactcgaggaattcgcgcagcaggcgatcccagccgcggggcaggtcgtgcgcgacgccgccgatacggaaccaggccgggtgcatacggaaaccggtaatcgcttccaccagatcgtagatcttttgacggtcggtaaaggcaaagaacaccggcgtcatcgccccgacgtcctgaataaaggtagagatgtacagcagatggctgttgatacggaacagctcggagagcatcacgcggatcacgttgacgcgatccggcacggttatccccgccagtttctcaaccgccagcacgtaaggcatttcgttaacgcagccgccgagatattcaatacggtcggtatacggaatgtagctgtgccaggactggcgctcgcccattttctcggcgccgcggtggtggtagccgatatctggcacgcagtcgacgatctcttcgccatcaagctgtagaataatacggaacgcaccgtgagcggaggggtggttcgggccgaggttaaggaacatgaagtcctcgttttcggtcccgcgcttcatgccccactcttccggtttaaaggtcagcgcttccatttccagatcctgtttggctttggtcagctcaaacgggtcaaattcggtggcgcgcgccgggtagtctttacgcagcgggtgaccttcccaggtcggcggcatcatgatgcggcgcagattcgggtgaccatcgaaggtcacgccaaacatctcccaggtttcacgctcataccagttggcgttagggaacagtttggtgaaggtcggcagatgcagatcgttttcagacaaggcaaccttgagcatgatgtcgcggttgcggtctattgaaatcagatgatagaaaacggaaaaatccgcggcgggtaaaccgtcgcggtgcgtgcgcagacgttcgtccatgccgtgcaggtcaaacagcatcacgtaaggcttcggcaatttcttcaggaaatcacccacctcaagcagctgttcacgcttcacccaaaccaccggaacgccggtgcgggttggctgaacggtaaaggcatccggcccaaaacggttgcgcagttcgccgatcaccgggtcatcaaggtgatcgcgggtttgccaggctggtgcggcgtcatgcgcggttaaatcggtcatattgttcaccattgcaaaaggtccgtggtgactgccggcgaggcttcgcgctgtagtagattgatttgcgaagtttttatcccgcccgcaggcgcaagttaaatctcgtccggagtccgcagattggtcactgcaatacgttcgccgcgtttacgctcgcgttccgactgcatattggcgcggtacacgccctgatcgccaaccacccacgagagcggacggcgttctttaccaatggattcctgcagcagcatcagcgcctgcatataagcttccggacgcggcgggcagcccgggatgtaaacatcgaccggaataaacttatccacgccctggacgacagagtaaatatcgtacattccgccggagttggcgcatgcgcccatcgagataacccacttcggctccagcatctggtcataaagacgctgaatgaccggcgccattttagtaaagcaggtgccggcgaccaccatcaggtcagcctgacgcggggaggcacgtaatacttctgcaccaaagcgcgcaacgtcatgcaccgcggtgaatgacgtcaccatttccacgtagcagcaagaaaggccgaagttgtaaggccagattgagttcttacggccccagttcaccatgtcatgcaaggcgtgttcgagtttccccatatacacgcttttattgacttcttgctccagggggtcggttacgatctcctgtttttgcagggggtaacggtcgttctcaccgttaggatcgatgcgggtgagcgtataatccatcttattgcctcgcttttactgcgtatgacggttagtgggactgtctgtttccgggttaaccagcgtgcgacgggagcgcgcaggcgtccagtccagtgcgccgatacgaacgaggtaaaccagaccagccagtagcactaaaatgaaaattgcggcttccacaaagccgacccagccgctttcacggatagaagtcgaccatgcgtagagatacagggcttccacgtcgaagataacgaagaacatggcaaccagataaaacttcgcagaaagacgtaagcgagccgaaccgacggagtcgatcccggattcaaacggcgtgttcttgcttcgcgcgcgcgcgcgtccgccaaggtaccagccgccgacgagcatcaggcagcacaggccgatagcgatgatgagaaatatagcgaatgcccaatgatgagcgatgacttcagtggatgttgacatacgcattgcttaaccaaaaaagtgtagcgctaaaaccctctgctcttactggcagatgaacgccacagcgtttcacggggaggaataaaaaaatagccgtgcaaaaaagcgtccctgggtgatgtggaaggccagttgcggtggctttttactcctttcattaaccttttgtcaactttaacaaaagttttcacaacattaatttacattggatttttttcattaacattaaatgccctttcatgcggaataaccttgcatactgttcggctttagtgttgttgaatcgtgtccgtttccgccgtaaatcaaaatggcccgcctattttgacaggattcagacacgattcctccccctaaggaggggtattttcttgatctgcgacacgcttttgttaattcaaccaagaaaacagcaacaaaccagatggttttttaacattagcaggaagtattgaaagtgcagagaaaagtcgagaaatgagaggaggagcggatctaacctactgatttagctcaaaataaatcaacaaaagtttctattaatcaataaaatttgaaaaaaacgaaccgcagcggcaatttcacacgtctggggttcgtttttacacttacattttgttaccagtttttgtgatgtttgttagcttttcccgctcaggaaataagggaattatctcccccttcaggagtataaacgcgttgcgtggaccacggctggtactctgcgctcagcgactgaaaaatggcctgcgtcagctcgcttgccttctgcggattgcagttcagcatgtagcgggtatccggcagcacgggtaaaccgtcactccggcccggtacgcgaaattcggggctcatcatctctaccggctgcacggtcacgccaagcccggctttcaccgccgccttcacccccgccattgagcttgccgcatgggaaagatgccacgcaacgccggcggcgttgagtacctcaacgatctcttcccgaaacggatccggggcatccagcaaaacaagcgggacagactcgccctgagggaggacataatccgctgcgcagtaccacagcgttggcgacgtgcgcagcgtcagcatgtcggaacccttggtttgtcgggtcgtcagcgcaagatcgattgccccgctcttcagcatatcgacgatatcaaggtgtttgaggactttgatttccagcgtcagcctgggataaaaactaccaatccggtttaacaggcacggtaaaatggtatccgccgtctcatcagaggctcccacggtcagcgttccctgcaggctgccaaacatgagcgacatacaggcttcatcattaaagcgcagaattttccgcgcatagcccagcagctgaatgccctgctcggtcagaagcttattgcgcccgtggcgagcaaaaagttctttgccaaccagctgctccagccgctgcatctgctggctcaccgctgactgggtccggcgcaccgcgacggcggcagcggcaaaggtactgagatcggcgacggcaacaaaggttctcaagagatcgaggtctaaatttagtatcgaacgattttcatttatcatatttgcttcacattcaggcggctaatgcttacctgccttgttgatactgtgctccaggcttccggctaatccttaagcttcgcgttacccgccagagacggacggatgaacaactggacgaacgttattgcattagaaagcactcatccgcagcaaatgcgcggaatttcagagtaatattttgctcgtacgcctaagcgcttttaattacgacgcatttgtttttgtgatgtgacgcaaaaaatagccgtcaatgaccattgtctgcatcctcaccggcgacaaaccttgccatcgggctcaggcagaacaaaaacctgcaataacaatgtattaataaagaaataagctacctggcatagccatatgtcggtattaacggcgatattctaaccgaaaaccacaatatttataagcgttaatcagtattatctcaggccactttaaatgctggttggcgctttaattaaattaacagatctaagaatattccttgcataaaataaaactcatttagctattaaatactttcattaaaaatatctagcaaagttgttacaaccttcagcgtattgtgaattaaacgttcaccagacgatgattcgttttacgcgtaaaaaacaagcgccggtcctctttaaatcaacaaaccagataaacgttcaccaaaacaccaccaggcacaatataagaccatcaataaaattattaaaggtgtaatgtataaacaaaagcgcagttcaccagataaattgattacaccaaaaagcgatgaatagcaaaatcttctcctgttaacccttcaaaacagcggggaggcggagtacattattccgtgctgacttccacggcagggagtggcgataacagctaaaaggtcaaggttcatgtcccccatcgaaaaatccagcaagttagataacgtctgttacgacatccgcggcccggttctgaaagaggcgaaacgccttgaagaagaaggcaataaagtcctgaagctgaacatcggcaacccagcgccgtttggctttgacgcgcctgacgagatcctcgttgacgttatccgcaaccttcctacctcgcagggctacagcgattcaaagggcctctattccgcccgtaaggccatcatgcagcattaccaggcccgcggtatgcgtgatgtgacggtcgaagatatctatattggtaacggcgtttcggagcttatcgtccaggccatgcaggcgctgctgaacagcggcgatgaaatgctggtcccggcgcctgattatccgctgtggaccgccgcggtcgcgctttccagcggtaaagcggtgcattatctttgcgatgagtcgtccgactggttcccggacctcgacgatatccgcgcgaaaatcaccccgcgtacccgcggcatcgtgattatcaacccgaataacccaaccggcgcggtgtactcaaaagagctgctgatggagatcgtcgagatcgcccgccagcataacctgattattttcgccgatgagatctacgataagatcctctacgatgaagcgcagcaccactcaattgcgccgctggccccggatctgctcaccgttacctttaacggtctgtcaaaaacctaccgcgttgccggcttccgccagggttggatggtactgaacgggccgaagaaacacgcaaaaggctatatcgaaggcctggagatgctggcctctatgcgcctgtgcgccaacgtcccggcccagcatgcgatccaaaccgctctcggcggctatcagagcatcagcgaatttattgttcccggcggacgcttgtatgaacagcgtaatcgcgcctgggagctgattaacgacattccgggcgtctcgtgcactaagccgaaaggcgcgctgtatatgttcccgaaaatcgacgctaaacgctttaatattcacgatgaccagaagatggtgctcgattttctgctgcaggagaaagtcctgctggttcagggtaccgcctttaactggccgtggccggaccacgtgcgtattgtgacccttccgcgcgaagacgatcttgaaatggcaattacccgtttcgggcgtttcctttccggctaccaccagctctgattttatctgtccagccgccgggatttgcatccggcggcaatccctgcgcacaatggcacccgacgtcgtaactgattaagggttcctatgagtcagagtcatttctttgcccacctctcccgcctgaaactgatcaaccgctggccgctgatgcgtaatgtgcgcaccgaaaacgtctccgaacacagcttacaggtcgcgatggtggcccatgcgctggcggcgatcaaaaatcgtaaattcggcgggcgggttaacgccgaacgcatcgcgctgctggcgatgtatcacgatgcctcggaagtcctgaccggcgacctgccgacgccggtaaaatatttcaattctcagatcgcgcaagagtacaaagccatcgaaaaaatcgcccagcagaagctggtcgatatggttcctgatgaactgcgcgacatttttgaaccgctgatcgatgaacatcactacagcgaagaggaaaaatcccttgtcaagcaggcggatgcgctttgcgcctacctgaagtgtctggaagagctatcggcggggaacaatgaatttctgctggccaaaggccgccttgaaaaaacgctggaatcgcgccgcagcgcagagatggactactttatgcaggtgttcgtcccgagcttccatctttccctcgatgaaatcagccaggattcgcctttataaccccacacttccccggccagcgtcagcctgaccggggaaggatgccgctgaatcagaacggaaacagcaccgggatcagcaggacgcacactaccatcaccaggagggtgaacggcacgccgattttgacaaaatcgctgaatgaatatttccccggccccagcaccagggtgttcaccggcgacgataccggggtcataaacgccgccgaggccgccatggcgaccaccatcgcaaagggataaggcgaaacccccatcgactttgccgcggccagcgcaatgggcgccatcagcaccgcggtggcggtattggaaataaacaggccgatagccgcgcacatcacgaacaggcagccaagcatcagataaggccctttactccccgccacatccatgaggccctgaaccaccagatccacgccgccggttttctgcagcgccagagcaaaaggcatcattccgacaatcaagataatgctcggccagtggatagctttataggcgctctcggcgttaatacagcggaatttacccatcagcaggcaggcaatgatggccgctatagggttaggaatttcgtcagtcagcatcagcgcgaccatcagcaccagacagaaaatcgcgtgcggcgcctggctgtgcgccggcgaggcgtcgttgacctcgatgggcatattcagcaccacaaagtcacggccccgcttagccagcagcgctatctgccgccagttgcccaccaccagcatgatatcgccaagctgcaaggcttcatcggtcaccgcgccgtcaagggctttgccatcgcgtttcagccccacgatgttcaaatcaaaacgggtacgaaaggcgatttcgcgcaccgacttgccaatcagttctgaatccgggatcagagagacttccgccatccccacgtccagcgcctgatcggaaaaatattcgccgcgcagcaccatcggttcgagcatctgctcgccgcagaactggcgtaaatccacgtctgaggccgacatatcgatcagcaagacgtcgcgggcgcggaattccgatacgccgttaacgttaacgataacccgtcgaaagcgccgccagcgctcaacgccgataacgttcgccccgtagcgctcgcgtagcttcaggtcgtccaggcgctggccaatcatcggcgagccggggcgtatggccaggcggcgcgcgcgccccgtgagatgataatctttaatgagatcgcggaaggtgcttctttttcggccatctcgcgcttgctcgccctcttctcctttgagcataaaacgcatcaccagcatatagaaaacgcccagaaccagcaccaccagacctatcggcgtaacgctaaaaaagctgaatccttgcagcccttcgcgtaaaagttcgctgttaacgaccaggttaggtggtgtggccaccagggtcatcatcccgctgataagtccggcaaaactgagcggcatcatcaaccgcgaaggggaggtgttcatgcgcatcgacacgctgagcaccacggggataaaaatggccaccacgccggtcgagctcataaacgcccctaatccggcaacggttaacatcaaatagaccagcattttggtttcgctgttgccggcaaccttcaccagccaggagcccattttggtggcgaccccggtgcgcaccagcccatcgccaataataaaaagcgcggcaataagaataacgttaggatcgctaaagccggagaaggcctcgctgagcgttaaagtgtcgctgaggacgaaagcgacaatcaccagcaatgcgatagcgtccatgcgcacttttccggtggcaaagagcacgacggctacggcaagaagggataacacccaaatcaattcaccgttcacaacttatccttgtcagaagatggagttggaagtctggcataaaaaagccccgccggcgcggggctaaatcatgagattaatctttaaggataatattcacgttgccgtcaggcaggcgttcaacctgcaggctctccagcgtcgttaatactaaatccgcttcatcaagacgcggcgcatcggcgggcacattgaccgcgatggtgcgacagccggcattcagcccggcgagcagaccggcaggcgcatcctccacgacggcgcaatcccccggcgccagccccaacagttcagctcccagcaggtaggcgtctggtgcgggtttcccgtgctttacgcgctcggcggtaacaaaaaccttcgcctcaggcagtcccgcggcacgatgacgagcgtgggcgacgggtatcgaacccgacgtcacgatcgcccacggaatccccgcgcgatcgagcgtcctgagcaacgccaccgcgcccggcagcgccgttacgccatccgtatccgttgcttctaccgtttccagcagggtgaactctgcctgaatctcctcttcgctgcggccggggagaaaatgacgcaacgaggttatcgcctgtttgccatgaatgaagttcagcacttcatcatgagggatactgaaccgatccgcccatttgcaccacgaacgctccacaaccggcaacgaatcgaccaatgtcccgtcaagatcaaacaggaaacctttacactgcacgggaacctccatcaggcgttgataatttggttaatttcgttactgcttaaatggtactgacgcgggcaggagtgccaggtgctcagcatgcgctggtatttttcccacatcggggtctgggagttaaaaccgtgagtgccggcgtcaaagtggctgtagcgcccttcaacgttaaccataaagcgaacatagccgagatagcgggcttcggtcgccacgtcgaagccgaggaaggtgacccgacgctcgtcaattccgctggcatccttcaggttcgtccaggagacatgcagcgcatgatacatctccatgatatcaatgatggtacgacacgtttcctcggtaagctggccaaactcgcggtccagctcgcgcatctgcagcccgtatccacgctcaatgatggtctgcaggcggcggtagcgttcagcgttgtccggatcgagcatcgtcatcattttgtattgattcgacagaatcagacgctgcgcattggtcatttccatttttgactcctgtggcacttttacgacgtgaaaaaagaaggcgcataattcatgcgccttcttttatatgcgttttcccgatgcaattacaaatcatcaaggaaagttttatccagttgtttgaaggcgcgcttaagcgtgtcagctaaagcctgataatccggcttgccgtcaaccggcgtcagcgcttgtcccgcctcctgcagtttaccccgtacttcataaaaccagttcagtatcgacggcggcagcggcgttaccgaacgcttacccagccaccataagccttgcatcggcagactcagcgcgaacagcgcggtagccacggcagggcccagctggccgccgagggcgatttgccagcacagcgtgaaaatcgccaccggcggcatgatgcgaatcgcatagcgcgtggcgcgaataatacggttttcaataaacaccggggcaaggcgcttatccagaggccaggtctttgcatagtgctgcccgtggcgaaacaagccaaaaaaactcacagggcgattctcgggaccggacatggcttacctcaactttacatataaaacttaaaaaatatgtgcaaaacaccaactgtgcatgacaacgttcaaaagattttggcaatggcggcctcaatcaggtattctgtgcgcacctgaggggcggttagacccttttaccaggttagtcaaattatcgcatattctgccaccggctgaaaattatgcaaaatgacataaaatcaaatgtacttctctcatcgtgcccgaaaacagtacaaggcatgatgttaatcataaatgtcgatgtcatcctgcgctacgctttgtgacacactgacgtttttttagccacgtatcataaaaggtacttccatgtcgagtaagttagtactggttctgaactgcggtagctcctctctgaaattcgctatccttgatgccgtcaacggcgacgaatacctgtccggtttagcagaatgtttccatcttcctgaagcccgtatcaaatggaaaatggacggcagcaagcaagaagccgaattaggcgctggcgctgctcacagtgaagcgctgaactttatcgttaacactattctggcacaaaaaccagaactgtctgctcagctgaccgcaatcggccaccgcatcgttcacggtggtgaaaaatacaccagctccgtcgttatcgatgactccgtgattcagggaatcaaagactccgcctctttcgctccgctgcacaacccggcgcacctgatcggtatcgctgaggcgctgaaatctttccctaatctgaaagacaagaacgttgccgtgttcgacaccgcgttccatcagaccatgccggaagaatcttacctctatgccctgccgtacagcctgtacaaagaacacggcgtacgtcgctacggcgcgcacggcaccagccacttctatgtgactcaggaagccgcgaaagttctgaacaaaccggttgaagagctgaacatcatcacctgccatctgggcaacggtggttccgtttccgctatccgcaacggtaagtgcgttgacacttccatgggtctgactccgctggaaggtctggttatgggtacgcgttctggcgatatcgacccggcaatcattttccatctgcacgatgcgctgggcatgagcgtagacgccatcaacaaaatgctgaccaaagagtccggtctgctcggtttgaccgaagtgaccagcgactgccgctacgttgaagacaactaccaggaaaaagctgacgctaaacgtgccatggacgtttactgccaccgcctggcgaaatatatcggctcctacaccgcgctgatggacggtcgtctggacgccgtcgtattcaccggtggtatcggtgagaacgccgcgatggttcgcgaactgtctctgggcaaactgggcgtactgggctttgaagttgatcacgagcgcaacctggctgcccgtttcggcaagtctggcttcatcaacaaagaaggcactcgcccggctatcgtcattccgaccaacgaagagctggtcatcgcgcaagacgccaaccgtctgaccgcctgattccacaccgccagccataaccctaaataattcgagttgcaggaaggcggcgacgcagagaatccccaggagcgtacgagtagtacgtaactggggtgagcgggtaaagccaacgcacatgcaacttgaagtatgacgggaagctggtggtgcagttttgtatcccgcctgatactggcggtaacgaaagaggatatatcgtgtcccgtacaatcatgctgatccctaccggaaccagcgtaggcctgaccagcgtcagcctcggtgttatccgtgctatggaacgtaaaggcgttcgtctgagcgtctttaaacctatcgctcaaccgcgtgccggtggcgatgcgccagaccagactaccactattattcgcgcgaactccgaccttccggccgcagaaccgctgaagatgagccacgttgagtcgctgctctccagcaaccagaaagacgtgctgatggaagagatcatcgccaactaccacgccaacgctcaggatgcggaagtggtgctggttgaaggtctggtcccgacccgcaaacatcagtttgcccagtctctgaactacgaaatcgcgaaaacgctgaacgctgaaatcgtttttgtgatgtcccagggtaccgatactcctgaacagctgaaagagcgcattgagctgactcgcagcagcttcggcggcgcgaaaaacaccagcgtcaccggcgtgatcgtcaacaagctgaatgcgccggttgacgaacagggccgtactcgccctgacctgtcggaaatcttcgacgactcttccaaagcaaaagtcgtgaagatcgatccggctcagctgcagagcggtagcccattaccggttctgggcgcggtgccgtggagcttcgatctgatcgccacccgcgcgattgatatggcgcatcacctgaacgccaccatcatcaacgaaggcgacatcaatacccgtcgcgtgaagtccgtcaccttctgtgcgcgtagcattccgcacatgctggaacacttccgcgcaggctccctgctggtcacttccgcagaccgtcctgacgttctggtcgccgcctgcctggccgcgatgaacggcgtggaaatcggcgctatcctgctgaccggcggctacgaaatggacgcccgcatcagcaaactgtgcgaacgcgcgtttgcaaccggcctgccggtattcatggttaacaccaacacctggcagacctctctgagcctgcagagcttcaacctggaagttccggttgacgatcacgagcgcatcgagaaagttcaggaatacgtggctaactatatcaacgccgactggattgaatcgctgaccgcaacttccgagcgcagccgtcgcctctctccgccagccttccgctatcagcttaccgagctggcgcgtaaagcaggcaagcgcgtcgtgctgccggaaggcaacgagccgcgtaccgttaaagccgcggctatctgcgccgagcgcggtatcgccacctgcgtactgctgggtaacccggatgaaatcacccgcgtggccgcctctcagggcgtagagctgggcgccggtattgaaatcgttgacccggaagtggttcgcgaaagctacgttgctcgcctggtcgagctgcgtaagagcaaggggatgaccgaagcggttgcccgcgagcagctggaagacaacgtggttctcggcaccctgatgctcgagcaggacgaagtcgacggcctggtatccggcgcggttcacaccaccgccaacaccatccgtccgccgctgcagctgatcaaaactgcgccgggcagctctctggtctcctccgtattcttcatgctgctgccggaacaggtttacgtttacggcgactgcgcgatcaacccggatccgaccgctgaacagctggctgaaatcgccatccagtccgcagactccgcgattgccttcggcatcgaaccgcgcgtggccatgctctcctactccaccggcacctccggcgccggcagcgatgtagagaaagtacgcgaagcgacccgtctggcgcaggaaaaacgtcctgacctgatgatcgacggcccgctgcagtacgatgcagcggtcatggctgacgtagcgaaatccaaagcgccgaactccccggttgccggccgcgctaccgtgtttatcttcccggacctgaacaccggtaacaccacttacaaagccgtacagcgttctgccgacctgatctccatcgggccgatgctgcaggggatgcgtaagccggtgaacgacctgtcccgtggcgcgctggttgacgatatcgtctataccatcgccctgaccgcgattcagtcgtcccagcagcaagcataatctgcccgctgcatgaaaaaaggcgaccggatggtcgcctttttatttacagcagctctcgcgccgccgagacaatatcatgcgccgtcaggccatactccttctgcaagaactcctgcgttcccacctggccatagcgctccttcacccccacgcgacgcatcggaaccgggcaggtctccaccagcacttccgccaccgccgatcccagcccgttatgaatactgtggttttcgcaggtcacaatacgcccggttttctcggcataatttttcaccagcatgcggtcgatgggcttcagggtaaacatatcaatcaccgccgcgctgaccccttcctgctcaagctgacgcgccgcctcaagggcttccgccaccatgatcccgttggcaatcagggtgatgtcgtcgccttcgcgcagcacattccctttgccgatggtaaacgtcgaacccggcgcatagacggtcggcgcctgtttgcggatcgtgcgtacccagtaaaaaccgtcgagatcgataagctgacgcagaatatcctcaaacatcaccgcatcggtcacttccagcaccaccgaatgggccagaccgcgcacgatccccatatcttcaaacgacatatgggttccgccgttatggcaggcggtcaccccggcatccgaagcgatcactttgacgttattccgctgataatcgagcgacataaacagctggtcgaagcagcggcggctggcgaaagcggtaaaggtatggacaaacggcttgcgtccggtcaacgatagcccggcggcggtgccgatcacgttggcttccataatgccgcagttgatgacgtgctgcggatgctgccgcgcgacgccatccatcgccatggagctcatcagatccgcttccagcgcgataatcgggctcctggcttcaatttgctgcgcgacgaatccggcatagactttacgcatctctacggcatctttttgccctgcgggtgcaaccttaatcatgttcagcctccagttggcgaatcgtctcgtttagcgtctctttcatctccgccgtcaggcgtaaatggtggttattactgagattctcgagatacggcacgccctggcctttcacgctatcgagaataaccacgcgcgggcgcgcatcgacgggaggtacgggttgaaccgcggccagcagcccggggatgtcatcgcctttgacggtgacaacatcaaaaccaaaggcgcggaatttatcctccaggttgaaagcgcaaatgatttcatccagcctgccgtcaagctgtaacttgttccagtcaacaaacacggtcagattattcagacggtgatgggcaataaactgaaaggcttcccagcactggccttcattcagctcgccgtcgccaacgatacagaacacgcgattcgcccgccccgccagcttatgcgacagcgccatgccgccggcgatggaaatcccctgccccagcgagcccgtagtggcgtccaccccacgcgttttcagccggtccggatggcttggcagccgcgtaccgttctggtttagcgtgctcagctcctccatcgggaaataccccttaatcgctaacgtactgtacagcgcggggccggcatgaccttttgataacacaaagtagtcgcgctctggccagtccgggtccgcgggatcaattttcatcaccgcgccgtacagtaccgccagcgtctccacgaccgacatactgccgccgtagtggccgaaaccgaggtccgtcagcgatttcagggtagcgacgcgaatgtcccgcgccaggttagtcacttcttgcacattcatgatttcgctccgctgttctcctgcgcgccgccgcccacaggtttctttttcacaaaaacgttgtacgccaccagcagcacaaacaacgccacaacaaggccggtaatcgcaaacggcgacaggtagcgggccaggttacccagcacgatacccacggcgccgaaatccgcatccgagaaagtggtgttggcaaagccaatcgcccccagtaccggcagcagcagcaccggcaggaaggtgatcagcaggccgttggcaaacgcgccaatcatcgccccgcgccgcccgccggtggcgttgccaaagacccccgcggtcgcgccggtaaagaaatgcggcaccacgccgggcaggatcagcacccatttaaactgcccgcagaggaacagcccgaccagaccgccgaggaaactaaacaggaagccaatcagcaccgcgttgggcgcgtaggggtaaacgaccgggcagtccagcgccggacgggcgttgggcaccagcttttctgaaaatccggtaaaggccggcacgatttccgcgaggatcagacgtaccccttgcaggatgatgaacaccccggcggcgaaggtaatcgccataatgatggcgtaaaccaggtagttctggcctccgctaaaggtgctttccacgtactcgcgccccgcgctcaccgccataatcagataaataatcatcatggtcagcgaaatggagatggagctgtcgcgcaggaagctcagatttttcggcaggttcatctcttcagttgaacgagatcctttaccgcagacgctaccgatccaacccgacagcacatagcccagggtgccgaaatggccgaaagcgatatcatccgtgccggtaatacgtttcatatagcgctgggccagcgccgggaagaacgccatcaccagcccgaggatcagggagccggtaaagaccagcccgacgccttcgaaacccgccacggtaagaatcacgccgatcatacaggccatatagaaagtgtggtgaccggtcaggaagatatacttcagacgcgtaaaccgggcgaccacaatattcgctaccatcccgaacgccataatcagcgcggttgaagcaccgtatttttccagggcaatagaaacaatcgcctcgttattaggaataatgccctgaatattaaaagcatgttcaaacatgccccccagcggattcagcgaaccgactaataccgtcgcgccgccgccaagaacaataaaacccagaattgttttaatggttcccttgacgacatcggagaaagatttcttttgcgctaccagaccaattaacgcaattaaaccgaccagcaccgagggtacttttagaatatcaacaacaaaattcagcgtttcaaggataaacatatccacctcgctatcaataattattgtctggcgaaccacgcgcgcagctgcgcttcgagttcgttaatatcgatgatgttggtaatcaccaccagctggctttccggcacgctggcgctggcggcaatgtcttttgccatcacgaataaatccgccgcgcccggcgttgccgacgacagatcggagtgctctacctcggcctcgatatcgagttttttaagcaccttttttatattcatctcaaccataaaactactgcccaggccagagccgcaaattgccataattttcattgttatcaccttttttgggtagagtacgtccacatcacgcaggcgcgtaatgggttataagccggataataaaattgaatcagtagcgcgcgacgatcgtttttatctcctcaatattggttgcctgatgtaatttattcatatcttcatcgctggaaaataattccgccagggcagaaatcatttcgatatggctatgtttatccggcgccgcaagcataatgataatatcaaccgggtcgaactcctcagagccaaacgataccccttgttgcagtttcaacagcgacagccccaggcccttcgcgccctcctcaggccgcgcatgcggcatcgccagtcccggggccagcacgtagtacggcccgagccgctggtgctgctccacgatggccgtcacgtaggcaggttcgataacgtcggccttcagcagcggccgggcgcagatgtccagcgcctgtggccaggtctctacgctttgccgcagcgcgatggtggcatcagagagccaagtcttgagcattttgtcccgcctcttttagcaaaagatgggcaaactttatgcaagcagccaatagttatctgcgagaacgatcacaaagatagcgctaccaacgctaaacattcagatttgtgatagcgctatcaattcgtaatcatcccatcaaaacgcagcaaaaaggcccgtttaaggcgtatactccctgacacgtgaagtaatggatgataataaaaacgtctgtttagcaggaatatgtatgtctctaacccgaaaacggcgtagtaccggtaaagtcacgatcgccgatgttgctcagctggctggtgtgggaacgatgaccgtgtcccgcgcccttcgcacgccggaacaggtttccgataagctccgtgaaaaaatcgaagcggcggtgcaagagctagggtatatgcctaatctcgccgccagcgcgctggcgtctgcctcctcaagaaccatcgcgatggtggtaccaaatcttgccgaggcgggctgttcggcgatgtttgccgggcttcagcagatattacagccggcagggtatcaaatcatgctggcagaatcgcagcaccgtctggagcaggaagaaaagctgctggaaacgctgctggcctctaacatcgccgccgccattctgcttagcgttgaacacagcgataccgtacgccactggctgaagaacgcctcgattccggtggtggagatgggcgcaatgcgcgccgatccgatcgacatgaatatcggtattgataacgtggcggcgatgttcgagctgacggagatgctcatccaccgcggctatcagaatatcggtctgctgtgcgccaatcaggaacagtggatttttcagcagcatttgcaggggtggtataaagccatgctgcgccatcatatgtcgcctaaccgggtaattaacgccgcgctgcccgccaacttttccaccggagcttcacagctgccggagtttttgctggcatggccggagctggatgcgctggtttgcgtttccgatgagctggcatgcggagcgctgtatgaatgtcagcgtcggcgcataaaggtaccggatgatttagccgtcgtcggttttggcgacagcgacgtgagccgggtctgccagccgccgttaacgaccatggcggtaccgcaccataagattggtatagaagccgggcgcgcccttctggagcgtcttacggagggaaactggagcgacagaaagcccatcgcgtccagtttatgcatgagggacagctgttagaaaactactcagcctcttcctgcttttcgctttttgctgactcattattcgcattgcgggtcatccacagcgccagcgcttttaatgagtccggagtgaactcatcgcagcgggcggtgatctcttccggcgtcagccagcacacttcgctcacttcttcttcctgcagcgcgaacgggccgtgcgatacgcagctaaacaggccgccccagacgcggcagtgtttatcttcgtagtagaactgcccgtggtcagcaaaaggcacgccggcaataccgagctcttcttccgcctcacggcgcgcggattccagcatttgctcgtcagcctgcaccacgccgccggcggtggcgtccagcatgcccggctggaaatcttttgtttcggtacgacgctgcaccaggattttgcccatcccatcatgaacaacaatgtaggtcgctcgatgacgcaggcactccgcacgcatttgttcgcggctggactgtgctatcacctcattgttttcattaacaatatcgacccattctgtgcttgccaaatgattctgttccgccatcaggaaaccttactttttaaagcgctcttgcggcgcgtctatacggttgaggggtaaattacgggtaaattgcgacctctgcaataacctgattatcatcgagtgctaaaacctgcaattgcccctcgttcagaagaccgtagctggcggtaaatccccctttagggatgctgaccgagccgggattgaagagaaaaatctcgccgcgtttctcggcaaccggaatatgagtatggccataagccagcacatcgccagcggcgagaggaggcaaattttcggggctatacagatgcccgtgggtcagaaacagacgggttcgcgcgctcaaaacctgctgccagggggcggtaatggggaaccgcagcagcatttgatcgacttcgctgtcgcagttgccgcgtacggcaatcacccgctccgccacgctatttagcgcctccgcgacctgggccggcgcatagccttcgggaagggcgttacgcggcccgtgattgagcacatcgccgaggataaccagccactgcgccccactgcgcgcgaacagcgcaagcacgcgttcagcggcaggcagagagccgtggatatccgaggcaaacatcagcttcatacatttcatctccacgcattacgatgccgctatgataacggaaccgctggcgcttatcagcccgcgcgtttggctgagagtgcgacgtagcgctgaaccgacgcccgctgccactggaaggtggcgtaatccaccagcgcggcgggaacctcatcgccgttcaggaccaggcgattgagcatcagcgccaggtcggtatcggcaatggaccattcgccaaatagattctgcccgccatgggacagcagaacgccagccgttgcaaacagcttgtcggcgctttttttcccggcttcgctgagcggaggtttctttgctgcggcaaagaccacgtccgtggagcgctcttcgcgaatcgtcattaaatcgctacgcagccaggcctgcacctgacgcgcccgcgcgcgcttttgcaggtcatgcgggtaaagccgctcccattccgggggcgcaaagcgctcatccagatattcggtaatcgcggaggattcgctcaggaagaattccccgatctccagcagcggtacgcgacgcgtcgcgctgtagcctttccagccgctttgcaaatgttcgccgctgtcgaggttaacggttttcagggtaaaaggcaggctcttttcctgcagggcaacgtatacggacatcacatatggcgagaaaaaatcggcgtcggaccacagggtaatcgcgggctggctcatagcatcctcaatggctaatgtaatggggcaatacgccaacatatcctgtctttcagaggatgtcactgaccgccacgctgaggatcttacatacttctcagggggtgaacgcgatcggcgaaagtcatccaggatgaggcaaacctgtcggatgatgccagttcacctatactcgaaaagtttgcgacctgtgacggcgaggaattttcatgatcgatttttactacgcacccactcctaatggccacaaaatcacgttattcctcgaagaagcgcagctggcgtatcgcctcatccgggtggatatcggcaagggggaacagtttcatccgcagtttctcgcgatctcacccaacaacaagatcccggcgatcgttgaccacgctcccgccgacggtggtggcccattaagcctgtttgaatccggcgccatcctgctctatctggctgaaaaaacgggaaaattactgagcggcgagctccgcgagcgccacgtcaccctacagtggttattctggcaggtcggcgggttggggccgatgctcggacaaaatcatcacttcaaccactttgctccgcaggcggtgccctacgccattgagcgctatcaggtggaaacgcagcgcctgtatggcgtgctcaatcggcgccttggcgagagtccctggcttggcggcaatcactacagcatcgccgatatcgcctgctggccgtgggtgaatgcccatcagcgccagcgtatcgaccttgccaattacccggcggtgcataactggtttgaacgcattcgccagcgcccggccaccgttgaagcgcttctgaaaacagaagcccattaaccccctgctcgcccgggaagctttgatgtatgattgcggaaattactacacggaggaagcctgccatgtctcaaccagacgccattattcgaattaagaacctgcgcctgcgtacttttatcggaattaaagaggaagagatcgccaaccgccaggacgtggtggttaacgtcgcgatccactacccggcggaaaaatcgcgcaacagcgaagatattaacgatgcgctgaactaccgcaccatcaccaagcgcattattagccatattgagaataaccgcttctctctgctggaaaaattaactcaggatgtgctcgacatcgcacgcgaacatcactgggtcacatatgctgaagtagagatcgataaactgcatgcgctgcgctacgctgattcggtatccatgacgatgagctggcggcgctagacgcatcttagggaggcgctatgaacgttctgcttactggcggtaccggcctgattggccgccatctgatcccccggctactggagcttggacatcacgtaacggtttcaacgcgcagccctgaaaaggccaaaagccgcctcgattcgcgcgtcaccctgtggcgcgatttcgagcatcaggcgaacctcaacggcattgatgccgtcattaatctggccggtgagccgatcgccgataagcgctggacggcggagcagaaacagcgtctctgccacagccgctgggataccacgcaaaagctggtcacgctgttcaacgccagcgatacgccgccctcggtgctgattagcggctccgccgccggttattatggcgacctcggtgaagtcgtggtaaccgaagaggagccaccgcacaacgagtttacccacaagctttgcgcccgctgggagcaaatcgcctgcgaagcgcagagcgatcgcacccgcgtctgcctgctgcgtaccggcgtggtgctggcgccgcgaggcggtattctggccaaaatgacgccggcctttaagcttggcctcggcggccctatcggtagcggaaggcaatatctggcgtggatccacatcgacgacatggtcaacggtattctctggctgctggataacgacctgcgggggccgtttaatatggtttccccttaccctgtgcgcaacgagcaattcgcccacgcgctggggcatgcgctaaatcgccctgccattttccgcgtcccggcggcggctattcgcctgctgatgggagaatcttccgttctggtactcggcggccagcgcgcgctgcctaaacgcctggaagccgccggatttggctttcgttggtacgatctggaagaagccctcgccgatgtgctgcggtagtccaggtccatcagggagagtatcgctctccctgattaattaatttatggaacccgcttcgcagcgcgtaaaaatcaccagtcctgtgtcgccttaactgtgaatctcattccagtgatatgcctttcactctgccataaccctgcgtgtaatttaacaccatcacaccgttgacattcgtcaacaatttattcaatattaccaggacgaattgatgaaggaatatccggataaacatatcagagcagctattgactacgcactggcacgagactggatttttatcactggcggcaaaagcgctcactgttttggcaggttgatgtgtgggacagcccggcaccgggaacatatgatgagcatctggtcaacgcctgcggtacccattaaccacgccaggcaaattatcagaatggtcgaccgctgccagccgcctgcctcgggtcagattaaccacaagaaggattaaaccatggcgctgtataattttacgctcaccctctccggcgtaactgctcgtaccgtgggtctggaagatgcgctgcatgccgcaggctgcgctgacgcactggtctgtttttacggaacggcggtctatctggagttcgatcgcgaaagagactctcttgagcaggctattctgtcagcgattgccgatatcgaatccgcatcggctctgaacgcgcgggttgaatccgtcgattccgcgctggtcggtttaagcgatattgccgaacttaccggcctgacgcgacaggccgtcgccttattaaaagatggcgcacgaggctcaggtcagtttcccgggccggtacagcgggttaaaggcaattccccgctgtggcgctggaaaaccgtcgtgggctggctggtgatggaaggacggcttgccgaagattcaccgctggtcgcccacgcgacagttctggataacctcaacctggcgctacaactgagggcgacgtcggagagcaccaccgtgctgcgctatcttcacggcttcggaaatcagccccgggcttgtccgacggttgcttagacgcattgcccttccggcgctttatgatgttaaggtggcggaataatccaccgctatggaccgctttatgagaatactcaccactccgcgcctgcgcctctctccgtttcactcatccgactggccttttttcctgcgcttacgacgagacccggaagtgatgcgctatatgggcgagattcttgaggagccggcgctgcggacgctgtttgcatcacgctgcgctgacccgggcgtattcgtactgcgcgacgccagcggcgcagcggttggcgatattggcctgcgcatcagcggtaaaaatccgcacgaagcggatgtcggatacgctctcctgcctgaggctcaggggaagggttacgccagtgaagcgctaaaagcgatttgcgactacggatttcagcagctcggcgttcacgcaataaatgcctgggtgctgggcagtaacgctggctcttcccgtctgctggaaaaacacggctttatccgcattcaggtgctcgaaaaagcgtatcatctgaacggcattgactatgacgactgggtgtatcggctggagcgttagccgccccgacggagagtgttccgccgggggctggacagtgtttacttcaaagagcccttcaggaactgctgcagacgctggcttttcggattgccgaaaacctcgtcaggatgcccttcttcttcaattttgccctgatgcaggaagatcacgtgcgaggagacgtggcgtgcaaagcccatttcatgggtgaccacgaccatggttttcccctcttccgccagctgctgcatgatccgcagcacttcgcccaccagttcagggtcaagcgccgacgtcggttcatcaaacagcagtacgtcgggctccatcgccagcgcgcgggcaatggaaacgcgctgctgctggccgccggagagatgaaccggatatttaatctgctgtcgttcatcaataccgactttcgccaggtattttaccgcccgatcgcgcgcttcctgtttactcaggcccagtacctgaatcggcgcctccatcacgttttccagcaccgtcatatggctccacaggttaaaatgctggaataccatcgtcaggcgagtacgtagcaaacgtagctgatttttatcagaaacctttaactgaccatctttatcgcgaaccaggccaatgttttgcccgttaacaacgatcgtcccttcgctgggcttctcaagaaagttaatacagcgcaaaaaggtacttttcccggaaccggatgagccaataatactgatcacgtctccggctttcgcccgcagtgagacgcccttcagtacttcatgctctccgtaacgtttatgcagatcgattacatttaatttattgtcggacatggcgttctcagtgcgtcgaagaaggtttgatatgctggagccagcgcttttccgccctgcggaacaggctaatcaacacatacgagataattaaatacagtactgcggcaataccgaaggcggtaaacggctggtaggttgccgagttaatatcgcgggcaattttcagcagatccggcaccgtggcggtaaaagccagcgcggtggaatgcagcatcagaatcacttcgttgctgtatgcaggcagcgcaatacgcagcgcggaaggcaaaataatgcagcgatacattttgaccgacgaaaaaccgtacgcccgggcggcttctatctcgcctgccggcactgaacgaatcgccccggcgaaaatctccgtggtgtaggcgcaggtattcagcgtcagcgccagcaccgtacagttcaggccgctgcgaaagaaggcgttcagcagttctgtgcctttgacgacctccagcgtgtacattccggaatagaacaccagcagctggacgtacagcggcgtgccgcgaaagatataggtgaacagccagatggggaactggataaatttattgctcgacactcggccaatggcgaggaaaaccgccaggatgccgcccatcaccacggaagagatcagcagccagagcgtaatcgccacgccggtaaagcgatagccgtcggtccacagcagggatttccagtactcctgaataatatcaatcacaggtcggccctcttcacgcccacagaataacggcgttcgagcatcagcagcacaccattggaaaccgttgtaaataccagataaatcaggccacagacgatggcaaagtagaacggctcccaggtgcttttacccgccagctgggttgccttgaccacatcttccagtcccagcagtgagaccagcgcggtcgctttgaggataacctgccagttgttgccgattccgggcagcgcatagcgcatcattgccggaaacagaatacgacgaaaggtttgcccaccgctaaagccgaaggccgtcgccgcttcaatatgtccctttggcaccgccaggaaggcgccgcgaaaggtttcggtgaagtaggccccgtaaataaagcccagcgtgatgatccccgccaccatggggtcgatatcaaactgcgccaggccaagcgcatcggttacgccgttgagcgcaatctgtagcccgtagaaaatcagcagcatcagcaccagatcgggcacgccgcggattaaggtggtatagccttcaaaaatcaacgccaacggacgattgttggaaagtttcgccccggcgcccgccagaccgataagcaccgccagaacgaccgagcttaacgccagctcaagggtgaccagcgcgccctgaaaaataacctgtgaaaacccgtacagcatgctgtctgccctgtctgtcatcaaccatcgcgcgcaaaataacgcgcgacggggtacgcgggatggttagtcgccgtacacgttaaaatcgaaatatttcttcgccagcttgtcgtaggtgccatcctggcgcatctcggcaaaggctttattcagtgcttcacgtagttcgttatcctctttgcgcagccccataccggtgccgacgccgaacagcttctcgtctttaatcgacggaccgccgaactgataatccttgccgataggctgtttgaggaagccttcgctggcggcgacttcatcctggaacgccgcgtcaatgcgtccggcagtcaggtcggaataaatattgtcctgtccctgataggaaacgatttcaatgccttttggcgcccagtgctcgttgccgtaggtttcctgggtggtaccctggagaacgccaacgcgcttgcctttcagcttcgcgaggtctggcgtaatatcgctgccttttttcacgaccaggcgcgaatcagccgcgtacagtttgtcggtgaaggcaatttcctgctggcgtttttcggtgatcgaaagcgaagacataatggcgtcgattttcttcgcttttaaagaagggatcagcgcgtccagcgggttctcaatgaaggtacattgcgtattgatacgcttacagagctcttttgccagatcgatgtcaaaacccaccagttcaccctgcgcattcttcgattcgaacggggcataagtaggatcggtgccgatgcggactttttgcggaatggctgcgaatacagtggaaacgctggaaagggccagcgctaaagagagagacaacgccagttttttcataactatcctcaacagactgtcattctaacggatttattagaagtacttacggcagttatcgtgccattattcgccccggtaaggcaaagcattctgcgccggaaagcaaattttttcgcatcggaaacgcttaactatgcactttttaacatcgcgtgcgcaatttcctgcaccaaattgatccgctaaaagcgcagctgcaccaaaatcagacagaaagggatgcgcatggcccggcgtgcgggccagcgggcgtcttaatcaccgtaaacgttgaagtcgaagtatttcttcgccattttgtcgtaggtgccgtctttacgcatgtcggccagcgctttatcaaacgcggccttcagctcgctatcgtccttacgcaggccgatgccggtaccatcaccgaagaactttttgtctttaacggaaggaccggcaaaggcaaaatctttaccggcaggttgcttgaggaagccctcgctggcggccacttcatcctgcaacgcggcgtccaggcgacccgcagcgaggtctgagtagatcaaatcctgattctgataggccacaacgtccacgccgtggctgcgccagcgttcattaccataggcctcctgggtggagccctgcagtacgccaacatgcttgcctttgagggattccagcgtcggttgaatcggcgagcctttggcggcgatcaggcgggagtcggccgcgtagagcttgtcagagaaggcgatttcctgctggcgtttttccgtaatcgacagcgaagagataatggcgtcgattttcttggccttcagcgacgggatcagggagtcgaaatcgctgccgacccaggtgcattttactttgatgcgcgaacagagttcgttacccaaatcaatgtcaaaacccacgaaatcccctttcgcatcctttgaagagaaaggcgcgtaggtggcatcggtgccaatgcggatactctgcggcagcgcggcgaacgcgctggaggcgctgcaaattcccatcattaaagagagagccaggaccgtcttcttcataggttacccttaagtgtcgtgatgttgttatgcgatgcgttatcttgttatttgtactgccgacaaaagcttgcacgttttatgccattttctcagtgcgtgctggaaatggcgttaaatttgttaaataaaggttgcaggtttgtcttaaaagggaagataccagcaataacggataaaccgcagtgccgcagcgcaaaaaaacaaattaaatgttgaggatttgatcgaggcgacaaaattgcactgcggggaggcggatgtgaacaaagcgcactatcttagtgcgccctacgcgccctgccagcgggaaaagaggtcttgcgggagagagatatcgaactgatcgatcacgcgattgaccgtctgattaatcacatcgtccaggcttttcgggcgatgataaaacgccggaaccggcggcataatcaccgcgcccatttccgccgcctggaccagcagccgcaaatggccaaggtggaacggcgtttcccgtacgcacagcaccagcggccggcgctctttaagcaccacgtccgccgccctggtcagcagcccgtcggtatagctatgaacaatgccggagagggtcttcattgagcatggcaaaatcaccatcccggcggttttaaaagagccggaagagatgctggcggcgatatcgcgggcatcgtgcaccacgtcggctaacgcctgcacctcgcgcagggagaaatccgtctccagcgccagcgtctggcgcgcggcctggcttaaaataagatgggtttcgacatccgaaacttcgcgcaaaacctggagcaagcgtacgccgtaaatcgcgccgctggcgccagaaataccgataatgagtcgcttcacgatgattgcccctttcacacaatggcgcagactttgccggattatagtctccgacgcaaccgcggacccgcatttggcgcgagaaaataaaaaagcccgcggccgtcagaccgcgggctctcagcaaaacagaggattacccttcgttgtgcatctctaagttttcaacttcattctgcagctgaaccgctttcgcgtcgtcgttacgcagagagtcgagatagtccagatactgctgatcgacatctttagtgacgtagataccgttgaacaccgagcattcaaactgctgaatatccggattctccgcgcgcaccgcgtcaatcagatcgtccagatcctggaaaatcaggccatcggcgccgatgatctggcggatctcatctacctcacgcccgtgggctatcagctcattggcggttggcatatcgatgccatacacgttcgggaagcgaatttccggcgcagcggaggccagatacactttcttcgccccggcttcgcgcgccatctcgataatctgctcagaggtggtgccgcgcacgatggagtcatccaccagcagcacgttcttatcgcggaattcggcgcggttggcgttaagcttacggcgcacggacttacggcgcagctgctgaccgggcatgataaaggtacggccaacgtagcggtttttaacaaacccctggcgatacggcttatcgaggatgcgggcaatttccagcgcgatatcgcaggaggtttccggaatgggaatgaccacatcgatatccagatcttcccactcgcgggcaattttctcgcccagcttcgtgcccatattgacgcgggcgctgtaaacggaaattttgtcgatgaaggagtccggacgcgcaaaatagacgtactcgaacaagcacgggttgctgaccgggttttccgcgcactggcgagtaaacagctggcctttttcggtgatatacaccgcttcaccaggcgccacgtcgcgcaggaactcaaagcccagcgtatccagcgccacgctttccgaagcaaccatatactcggtgcggccatcgccgatatcgcgcttgcccagcaccagcggacggatgccgttcgggtcgcggaaagcgaccatgccgtgaccgataatcatcgccacgcaggcataagcgccgcgaatctggcggttggtggcggcgatcgccgcaaaaatgttgtctgcttccagcggatagtggcggaagttgtccaactcgctggcgaagatattgagcaggatttcggaatcagaggtggtgttgatgtggcggcgtttttcttcaaacagctttttacgcagctcgtgagcgttagtcaggttaccgttgtgcgccaacgtaatgccgtatggcgagttgacgtagaaaggctgtgcctcggaggcgctggagctgccagccgtcgggtaacgaacgtgaccaatacccatattgccctgcatacgctgcatatggcgagcttcaaaaacgtcgctcaccagaccgttcgccttacgcaaacggaaacagttgttcgcatcaatggtgatgatgcctgcggcatcctggccacgatgctgaagcaccgttaacgcgtcataaatcgactggtttaccggcataacaccggcgataccgacaataccgcacatacgtcttttcctcgttaagctacatcccaacgcttatgctttgggcaagaaacttgacgagctctgcagatagtcaaagaaccatctgataacgaaactgaactgtgggataagctcagacttttgccagtcttcgcttttcgccataccggtaaagctatcgagaaagaacagaatcgccgagacgattagcaccccgcgcagggcgccaaagcagatccctaacaccctgtcggttcccgacaggccggttttttccaccagctgacctatcacaaagttaacgatagcgccgacgataagcgttgcgataaacagtatcgcgatagcaatcccatttcggaccagttcgtcttcaaagcccgtgaaccagacagccaggtaagtgtagtaatgactggcaacaaagaaagcgcatccccaggttaccagcgataaagcttcacgaacaaagccgcggatcaggctaaccagtgaggaaaaaccaatcaccgcaattatggcgtaatcaatccagaccatatacgtcccacgattttacgccctgtcgtccggttcggggcgcattctaacagaaaaagaaaacgtttgcgtagggatttccgtgccctacagaaataaaaatggcgctgaaaaaacattcaacgccatactgcctttcgcctcttcagggcgcgtcagacaggagtttcagcactctactcctttaaaaaagagagagttagttcggactgtagcccatgaccacgccgctaagtcccgaaagctgcttcagctcaccaagctgacctttcagcttatccttcgaggtatccggccccacgagaatacgggtaattttaccctgcaccggcgtcgaaggcgacgtgtaaactttaaagccggaagcgcgcagcttaccgacaatctcgttgaccttatcggcgttcttcagcgccccaagctgcaccacataggctttaccggtcggtaccggaatttcagcctgctgctgcggtttaggcggcggcgtctgcgccgcaacctgctgctgtggttgcggttgcggcttctctaccggcttcggctgaggtttcggctgtggtttcggtgcgaccactggctcctgcaccacatcaaaactgttgttgttcaccggtatccgcgacggatccagcgatggcgcagcggcatcgccggccctcacctcttccgccgccccttcaggcggctgcgaaggcagcgcctgggtcgccgctggcagcatatccggctcatcgcgatcccccggttttggcaccagcggaatggcggcaaactcatcctgataatgttttttctgaccatccagcagccctggcaggataatcacccccagcgccaccagcacaatcgtcccgactaaacggttctgaaacttactcgccaccgattctccccgcgtctatttcttccattacatgcgccaccgtatggaatgaaccacacaccagcaccgtatcttcaggcccggcgtccgccatcgcggcatgccacgcctcagcgacgctagtatagactttacctgcgcgcaaatgttccagcagctgctccgccgtggctccgcgcggcccttccagcggcgcgcagtaccagtcgtcaacttcggcctgcaaatttgccagcgttcccgcgatatccttgtcatgcagcataccaataaccgccagcacgcgccccgttttcgataaggttttgagacgcccggcgagataggccgccgcatgcggattatgggcaacgtccaggatcgtccggggagcatcgctgattatctgaaaacgccccggcagcatcgcgttttgaacgccatcgcgcaacgcctgctcgttgaccttaagcccgctggcgcgcaaggccgcaatcgccgtagccgcattcggcagcgggacctgcggcagcggcagatcgcttaacgccccctgacgatcgcggaaggaccagccttgttcaccggcgtcatactgccagtcaacgtcacggcgcaggagccgcgcccctttttcgctcgccacctcagcgatggtcaacggcatatcgggttcgccgacgacagccggtttaccagggcggaaaatccccgccttttcgcggccgatgctttcgcgatcgggccccagccagtcggtatggtcgagggcaatactggtcaccaccgccacgtcagcatcgacgatattggtcgcatccaggcggccgcccaggcccacctcaagaatcaccacatccagccgcgcctgctgaaacagccacagcgcggagagtgtgccaaactcgaaatagctcagggaaatctcgccgcgcgcggcttcaatttcggcaaaagaggtcgtatgcgcgagctccgccagctcttcgccctgcacccgcacccgctctgtgtagcgcaccagatgcggcgaactgtaaacgccaaccttatagcccgccgccatcagcaccgactccagggcacggcaggtggtgcctttgccgttggtccccgccaccgtaaagacaaacggcgcaggtttcattaccgccatccgctgcgcgacctcgctgacgcgcgccagcccgagatcgatagttttgctgtgcagatgttccagataagaaagccacgtagccaggggcgacgtggcctgaggaataggttgtttttccatgatgtccggcaagagttaggataactacgcgtaaaaaaaagggcagcgccgtcaggcctgccctctgcattatcaggcctctggttcctgatccggcaccggtggcaccacctcaccttcgtgagcgggttccggatttggcgccggaaggttcatcagcttcgccagaatgctggccagcttcagacgcatttccgggcggcgtacgatcatgtcgatcgcccctttctcaatcaggaactcgctgcgctggaatcccggcggcagcttctcgcgaacggtctgctcgataacgcgggggccggcaaagccgatcagcgcttttggctcagcgatgttgagatcgcccagcatcgcaaagctcgcagacacgccgcccatggttgggtcggtcagcacggagatatacggcaagccgcgctcctgcattttcgccagcgcagcggaggttttcgccatctgcatcagcgacatcagcgcttcctgcatacgggcgccgccggatgcggagaagcaaatcagcgggcagttgtcttccagagcctgctcaaccgcgcgaacaaagcgcgcgccgaccacggagcccatcgacccacccataaaggagaattcgaaagcggcggcaacaaccggcatatcatgcagggtgcctttcatgaccaccagcgcgtctttttcgccggtctctttctgggcggacgccagacggtctttatactttttcgaatcgcggaacttcagcacatctttcggctcgagctcgcttcccagctccacgagggaaccttcgtccagcaggctatgcaggcggttgcgcgccgacatacgcatgtggtgatcgcacttagggcaaacctccaggttgcgctccagctctgcgcggtacaatacctgaccgcagctgtcgcacttggtccatacaccttcagggatacttgccttacgggtgggggttatattgcttttaattcgttcaatccagctcattgataacctttctacctgaacctggtcgatgccagttttgtcgcaaggggcgcataatgccatttttgcccctcacagaccatgaatgttgcacattaaatcataacatcccgtaacatgggataaaaaagtggtcgaaccgctcacacttcactcttcgggcggcggcataccgcccgaagatcgtcgccgcgttatttcgcctgtttcgccgccgcccgcttgtggcggatgacttcaatcacgcccggcaatacggacaggacgataatcgccacgatcagcagcttaaggttttcctggacgatcggcaaatcgccgaacagataacccgcgtaggtaaataacagtacccacagcagcgcgccaacaacgttatacatcgcaaaatgacgataggacatatgccccattcccgccacaaacggcgcaaacgttctgacgatcggcacgaaacgggccaggatgatggtcttaccgccgtggcgttcgtagaagctatgggtcttatccaggtagctgcggcggaaaattttcgaattgggattactgaagagcttttcgccaaacagccggccaatcgtgtagttcaaggcatcgccaacaatcgcggcaatgaccatcagcagcaccattaaatgcacgttgagatcgttggtcggcagcgcggagagcgcgcctgccacaaacagcagcgaatcccccggcaggaacggcgtgaccaccaggccagtttcgcagaacagaatcaaaaataaaatcgcgtatacccaaatgccgtactccgcgaccagttcagccagatgcacatcaatatgcaggataaaatcaattaaaaagtgaatcaggtccatagtttgcgttagcccttaataacccggttagtccgccagaaacagcgggcccatcggcatgaccgggaggtcgtagtgggccgggtagtcgaccgacaccagatacaatccttccgcctttgccgttgcggcagcaagcgtcctgtcttttgccgccagaagttctgcaatccagctctctggctggttaccggcacctacttccatcagactgccgacaatgttccttaccatatgatgtacaaaggcattcgctttgatgtccaccaccacatatgcaccataacgggtgacgttaatatgcatcacgttgcgccacggcgtgcgcgactggcactgtaccgcacgaaacgaggtgaaatcattctctcccagcagacactgagcggcgcgctgcatccgctccgcatccagcgggaggtaataatgggttacgccgcggctcaataccgccggccgcagacgatgattatagataacataacgatagcgacgcgccgtggcgctgaagcgggcatgaaaatccggtggaaccggctttacccagcgcaccgcaatatcgccgggcaaattcgcatttacgcccagcgtccatgcggcatcctgacgctgcgcgcgggtttcaaaatgcacgacctgaccggtaccgtgaacgccagcatccgtacggcccgcgcaaaaaacgttaacaggctcgttcgctacctgcgagagcgccttttccagcttctcctgtacgctgcggacttcgttctgccgctgccagccgtagtacttgctgccatcgtattcgatgcccagcgcgattttgtagaccggcggctgctccatctcagacatcagtacaaatactcctgaaccagcttctcagcgattttcaccgccatcagcgcgccgccaaaacggacgttatcggcgacggaccagaactgcacctgctcaggcataccgtagtcgttatgcacgcagccgacggagaggcgggcgttaccggaagcatcgccgacctgcgtcgggaactcgccctcttcggacagttcgatatcttcgccaaggctaaaggcatcgcacgcctcttcggcggccagcggacgctgcgcttcaaaactcaccatctgcgcgtggccgtaaaacaccggcgactgaacgacgtttgcggagatcatcaggccatcatcctgcaggattttgcggacctcatcgacgatacggcgctcttcacgcacgcttccttcacgatcgggcagcagcggcagcatattgaacgccagctgacgaccgaagaaatcatcttcatcgatcggaataccgttaagcaatttggcgctctgccccgcgagggcatcgaccgcttttttaccgtgagcggaagcggaaagcaggctggtcacgctgatacgcgccaggccgccccgatcgatcaacggtttcaacgccgacagcagctggctggtcaggctattcgcgaccgagataacgttacgattgcggtaatccgccagtacgaacgggttaacatccggtaccaccagcggcacgtccggctccagcgcaaacagaccgcttaaatcaatcaccaggcagcccgcgttagtggcgtcttcgatatacgcggcggaggcctctacaccggcggcaaaaaaggccagctgggcctgggtccagtcaaattccgccgcatcctgaacgataaccgacttgcccgaaaaacgcagatgttcaccggcgctatcgctacgcgccagcgcataaatatcccccaccgggaactgacgatcggcaagcgtttcgaacagggcttcgcctacggcgcccgttgcgcccagtacggcaatattccagccttcagacatggtggtgtactccagaaaaaagcggccctgccggattatccagcaggagcattaagatgatattaacgaacaggatgatgaacggcgttaaagcccagctggcgcaacagcgtcgccgcctgcgcatcgctgcactgtacgtacagcgaagaccattcacggcgttcctgataatttttgcgcagtttgtcgaactcgcccgcagcgcccgcgacttttcgcagcggcgcatcatcgcggcgcacatcatacaccaaatgcgccagccgttttagcgttgcctgatcgagcggcccgtgcagcgtaatgcggccaaactccggcgccggtagcaacgtgtccagcgccacctgctgtggatgaccaataaacgcgctgtaggcctcaaaaacctgcgtcgtaccgcgcgctttgccttcaagggtatagccggcaatatgcggcgtaccaatatccacccgcttgagcaattcggtattcagatccggctccggctcccaaacatccagcaccacgcttaatgcctgcccggcctgcagccgctgcagcagcgcggcgttatccaccaccggaccacggcaggcgttgattaaaatcgtccccggcttcaggcggcgaatcagcgcctcatccgccaggtgcagcgttttgtactgcccttccttatagagcggggtatggaacgtcaaaatgtccgcgtcctgcaccagctcgtcaagggagcggaaatccccctcgtcgccgcgatcggcgcgcggcggatcgcagagcagcgttttgattcccagcgcctcaaggcgtttttgcagacgcccgcccacgttgccgacgcccacgatcccgacggtacggtcggccagcgcaaaaccgtcacgctcggccagcatgagcagcgcggaaaacacatattccaccaccgcgatagcgttgcagcccggcgccgcggaaaaaccgattcccgcctgctgtagccacgcctgatcgacatgatcggtacccgccgtcgcggtgccaacaaatttgatcgctttgccagaaagtagcgcttcgttaactttggtgacggatcgcaccatcagcgcatcggcgtcattcagcgcttcaaccgggacagggcgacctgcaacggccttcacttcccccaggcggctaaaaagctcgcgcgcatagggcatattttcatcaacgaggattttcacggttcagtacctgtctgagagcgagagtaaaccggggaagtgtgccataatctgcccgccaggaacatcaccacccggcccttagtacagtaatttagtacagcaatacgcaaaggattaatcatgacgcaacccgtttcaggtatgtccgatcgccctccgggctcaggcgaacctccgctcaccactcagcagcgtaccgcgcttgagcggctcattacgcgcctggtggctttaacatcccagcaaaatgcggaagtgtgggcctgcgtaaaacacgatctgagcctgaaaaacgacgcgccgctgctggcaagccattttgccgccgccgagaacagcctgaaccagcgcctaatcctcgcccagcaaaatcatcaccgtcggcaaatcctggcgcagctgagcgagctgctgaatcagggcaacaatcgccaggcggtcagcgattatattcgtcagcatgacggtcaaaccgccctgcatgccttgtcccagccgcagctggagaatgttctgcagctcctgcaaagcggccagctctcgattcctcagccgcagcagcgcccgccaacgcatcgtccgctgctgcccgcggagcacaacacgctcaatcagcaggtgaccagactcgcggcggccaccggcgagtccagcaagcttatctggcaatccatgctggagctaagcggcgtcaagagcggagagctgatcccggcgacccacttcactcccctctcgtactggctacatgcccggcaaacgctcagttcgcaggctgcgccgacgctgacctcgctgcaggccgcattaaaacagccgcttgaagccgcggaatggcaaagagtgatggattttgcccaaacccactggcacgcgacggcgaaaacgccgctcagcgcggcgcagctgctgacgctgctcaacaaaattttcgtgctcagggtcgccagagcccaggagacgctggcgatcccgccggttcaggcgcctcccgcctcaccgtggctggtattgaaaaaaccgtgggttatcgcgctggcagttatcgtggtgcttgccctgctgtggctggtgatttaaggagatatcatcggcccgcatgccgggccgaatgaagcgctacttacgcagcgacaccaggctaaccaggatccccagcacggcgcatattgccgcggccaggaagacggaagagtagcctaacgacgtcgccagcagcccggtaagcgggccggtgacgccgtaagagatatcctgaaacgcggcatagccgccaagcgccgttcctcgtacctgcggcggtacccgcttcacgacctcgacgcccagcgccgggaagataagcgagcatccgcagccggtgagcgccgcccccgccagcgcgatccaggcattgggcgcctgccagagcagcgccaggcctatcgcttcaatcagcagcgaaacgatggccactttcaccccgccgaagcggtccggcatccagccaaacagtacgcgcatcaggacaaacgccccgccaaacgcggtcagcgtaaaaccggccatcgcccagccgttgctggcgaaatacaaagagacaaatgtgccaattaccgcgaagccgacgccctgaaggccaagaccgataccgggccgccagatcattcccaccacgctccacagcgacggccgctcgccgccgtgagcaggaattttacgcaccgtgccgttaatcgcccaggccactaacggcagcaccatggtgacgcaggccagcgccgcgacgccgtaatggctgtagatcagcagccccagcggcgccccggccgccagagagccgtatatcgccataccgttccacgacatgactttaccggagcgcatgggccccaccagccccatcccccagcttaaattaccggtgagcagctggctttcaccaaaacccaggatcagacggccaagcaccagcaggccaaacttcgccatgaccggcaccggcagcagcgcggcgcacagccaggcgccccccgccagcgcgcaggccaacatcccctgcaggacagagcgtttggcgccgtactgatcggcaaggcggccggcatagccgcgggttaatacggtcgccagaaactggataccgacggcgacgccaaccatggtattgccaaatcccagttcctgatggacaaacaaagggataaccggtagcggcaggccgacggtcatataggtgagaaaaacggcgaacgtgatccgaaacagcgaaccattcgctgaaggagtgcgttttgtttcagtgactgcggacatgctttactccagttcgcagagtaaggcgaggtgagaccacgccctctccacctgattatcagggttaaggcgcgttggatgacgttaaacgcttacgcattatctgagagaataatgttgtgccaggagtttgccttttctcccgggggtctgtcaagaatacaaaaaagggagcccgttggctccccttgtaaagcgtgttcgttatgcgcggtatttgcgcatgaccagcgtggcgttagtcccgccaaagccgaagctgttagacatcacggtcgtcagcgcgcgttcggtcggctcggtcacgatattcaggccggcggcctgctcgtccatctcttcgatgttgatgctcggcgcaataaagccgtgttccagcatcagcagggagtagatagcttcctgtacgccagcggcgcccagggagtggccggtcatcgctttggtcgcggagatcgctgggctgttatcaccgaagacttcacgaatcgcccccagctccttcacatcgcctaccggagtagaagtaccgtgggagttcaggtagtcaatcggtgtgtcaacgccgtccatcgccatcttcatgcagcgaaccgcaccttcaccggacggggcaaccatgtctgcgccatcggacgttgcgccgtagccaacgatttcagcatagatgtgcgcgccgcgcgccagagcatgttccagctcttcaaccacaaccataccgccgccgcccgcgataacgaaaccatcacgatgggtgtcataggtacgagacgctttttctggcgtttcgttgtatttggtggacagcgcgcccatcgcgtcgaattcacacgccatttcccagcacagctcttcgccgccgccggcaaacacgatgtcctgtttgcccagctggatttgttcaacagcgttaccgatgcagtgggcggaagtcgcacaggcggagctgatggagtagttcacgccgtagattttgaacggtgttgcaaggcaagcggataccgcggacgccatcgctttggtcaccacgtaggggccaaccgctttcagaccgcgcgggctgcgcattgcatcagcgccgaaaacctgagatttagaagaaccgccagaaccggcaatcaggcccacgcgcgggttttgctgatagacttcatctttcaggccagcatcttcaattgcctgctgcatggaaagataggaatagatagaggcatcgttcatgaaacgaaccactttacggtcgatcaagccggtggtgtccagtttgacgttgccccatacgtggctgcgcattcctgaatctttaaactcttcagagaaagtgatcccggagcgtccttcacgcagagatgccaggacttcctgctggttattaccaatactggaaacgatgcccaggccagtaatcactgcacgtttcattcaatacctctgtaagtcgcactatattaagtttcgagtcgcacaatagcgtacacttgtacgccgaacaagtccgatcagccaatttgtgtataaatttgcgccctcaggcacacatcgttaagatcgttctacgccttgtgattcgagtaacttacgtgaaacaaaacgccatacaacccgccaacctggaattcaacgctgagggtacacctgtttcccgagattttgacgatgtctacttttccaatgacaacggtctggaagagacgcgctacgttttcctcgacggaaaccagctcaaggaacgcttccctgagcatgcacgtccgttctttgtggttgccgaaagcgggttcggtaccggcctgaatttcctcacgctgtggcaggcgtttgacgtttttcaccgcgataaaccagaagctaccctgcaaagattacatttcatcagtttcgaaaaatttccgctgaaagcggaggacctgcgccttgctcaccagcgctggccggagcttgcaacctgggccgagcagctgcaggcgcagtggcctctgcccatcgcgggctgccatcgtctgctgctggatgaagggcgggtcacgctggatttgtggtttggcgatattaatgaactgaccaacgagctcgatgattcgcttaatcagcaggtggacgcctggtttcttgatggctttgccccggcaaaaaatccggacatgtggacggcggagctgtttgcggcgatggctcgtctggcaagacccggcggtaccctggccaccttcacctccgccggctttgtgcgccgcggcctgcaggaggccggtttcagcatgcagaagcgcaagggttttggccgcaagcgcgaaatgctgaccggcgaaatgcgtgaaacgccggagatccccgcgcgcgcgccgtggtttgcccgcagcggtacggaacagcgcgatgccgcgattatcggcggggggatcgccagcgccctgctcgcgctggcgctgctgcgccgcggatggcaggtaacgttatactgcgccgacagcgcgccggctgaaggcgcatccggaaaccgccagggcgcgctctatccgctgctcagccagcacgatgccgccctggcccgcttcttcccggcggcatttactttcgcccgccgcctgtatgacgctctgccggtgatgttcgatcatgactggtgcggcgtgacgcaactgggctgggatacgaaaagcgcgcagaaaatcgcccagatgattgcgcttaacctgccgccggaaatcgccgtcgccgtggacgcccgaaccactgcgcaacaaaccggtgtggaaaccggctgcgggggcatcgcctatcctgccggcggctggctttgtccgcagcagttaaccgctgaactactggccctcgccgccactcgcggattgcgcgtgcgctacgattatccggtcacggagctcagcgcagacaacaacggctggcaattaaaccagcggcagtaccacgaggtcgtggtgctggccaacggccatcagatgacccgctttagccagacggagcatcttcccatgtacccggttgccggtcaggttagccatattccgacgacgccagggctatcgaaattgcgccaggtcctgtgctacaacggctacctgacgccgcaaaacccgcataatcagcaacactgcattggcgcaagctaccaccgcggacaggcagaggccgcgtttagcgccgaggatcagcagcagaatcgccagcgcctgattgactgtttcccgcaggcggaatggacgcgggaggtagacttgagcgctaatcaggcccgcagcggcgtgcgctgcgcaacccgcgatcatttgccgatggtcggcagcgtgcctgattatgaggccaccttacgcgaatatgcctcgctggctgaacgtcaggagcaggccggagaagcgccggtttaccgcaacctgtatatgctgggcgcgctgggctcgcgcggcctgtgctccgcgccgctggcggctgaaattctggcgtcgcaaatgagcaatgagccattacccatggataaagaaacgctggcggcgctgaatcctaaccggctgtgggtaagaaaactgctgaaagggaaagcggtgaaataattgcgggaaatagagcccggctgagcgaatgccgggctttggcggagggcagaactatttctgcatcgccttctggtacaaactgttccacatttcctgcaccagaacctgatccggcggcgacagttcgcccgcgctgatggctttttccaggctccgggataccttgtcatgtaccgcttgcgcagtatgctcgccctctccttccagctcggccaccgccagcgtcaggtggccgcgcagataaccgccggcaaacagttcgtcatcactggcgtggtcgaccatatcatcaattaacgccagaatgcgtgattcaaactccgcgatcatcttctttcctcatagtatgtaaagtgtggccttagtgcaggtcttccggccacgggaactgttctgccgtcaagggcggcgtttggtaatattcttgcagcgcctgaatgaaacgcgcgggacgctcagggatcccctgctccagataggtcatcacctgggcatgcacgcgccgctgaaaagcgatccgatcgggctcaaaatccccttccaggttgtcgcagctgacgttaaatgggtatcccgccgccacgcaaaacagccagtcaaacgcctgaggcttcacctcaacgtcttcaaattgagactgggtcatcgcgtcgcgaccgtccgggcagtaccagtaaccgaaatctaccagctcacgtcgcgccttcccggcaatgcaccagtgcgatatctcgtgcagtccgctggcgtaaaagccgtgggcaaagacgatacggttgtaaggcacgtcatcatctgccggaagatagatcggttcgtcatcgcctttaatcagacgggtattaaaatcttcagcaaaacagccgtcgaaaatttcaatcagctgttcatatttatgcgtgctgttcattagttcatccccagccactggaggaactcctgtccatggctgtcataaagcagttttgcactcatcaccgccgacaccacgacgatcatcggtcgaatcagtgactgtcctttgctcagcaccagccgcgatcccgcacgggcgccgataaattgcccggccagcatcacaaagccggtagcccatatcaccttgccgccaataataaacaacagcaggccgccaacgttagacgtcgcgttaagcaattttgcatgcgcggtcgatttcgccagattgaaccccgcgagggtgacgaaagccagcgcgtaaaacgatccggcgcccggaccaaagaaaccgtcgtaaaaaccgacgcagccgccagccaccagggcaaacggcagaccgtacagacgtcgctgccggtcctcttcgccgagcttcggcatcagcagaaaatagaggccaatgccgataaccaggattggcagtatctgcttgagaatatcggactggacgtgctggaccagcagcgcgccgcccgtcgagccgagaaaggtcatcagaatattgagcttctggtcggcaagattcaccaccttgcggcggatgaaataaagcgaagcggacagcgacccgccgcaggcctgcagcttgttggtggccagcgcctgcgcagggggaagacccgccgccatcagggccgggacggtcaataacccgccgccgcccgccagtgaatcgataaatcccgccagaatggccacgaaaaacagtacgaccagtaccgtcggtgacaccataaaaacgtcgataaaactatccattaaagaatatgctcatccagtagcgcctggcaggaaggcggcagcggaggcggcgtcttcttcacaggaggggttgatcctggcttagggggttcaaaccagctttgcaattccgcaccgcagccatcgcccgccggaggcggagcctggtcttcacactcgaggctgtcggccgggcagcgcaggcgcacgtgcatatgcgctcggtgctggaaccatgggcgaactttgcgtagccagtcgcgatcgctaccggcatccaggcacagctgctgcttaatcgccgggttgacgaaaatacgcgtaacgtcgctatcttgcgccgccatcttaatcagctggctgatttgcgggctccacagcgacggcactacgcgtttgccgtcgcgggccaccaggtccagcgcctgcggcttcagcagctgagctgaactccaacgcgcctgcggcagctgaagaaaaatatcgacatccagtccggactgatggctggcgtggccgccgttaaagcgcccgccggccggcatacccatgtcgccaatcagcaccgttcccatgcctttattgtgcgcctgattgctcagacgctgaataaactgcacgaggtccggatggccgaagtagcgattctgatcggtacgcatcacctgataaccagtggcgtttaacggcagcgcctgcgcgccaacgatacagccattggcaaacgcgccaatggactgcgggctgccgctaacgggctgcgtaattttctgccacggcgtcgccgccaggctggtaccgctggcgaggagcgccagcagtgcgataacggtgtttttcatctatgaccagcgtggaattgatgtcgtcacgtcgccattttgcgcgcgctgacgcataaagtgatccattaacacgatcgccagcatcgcttcggcaataggtaccgcacgaataccgacgcaaggatcgtgacgccctttggtgatcatctcaacttcttcgccaaagcgattgatcgtgtgacccgggacggtgatgctggaggtcggcttcagcgcgatattcgccacgatctgctgaccgctgctgatgccgccgagaatgccgcccgcgtggttgctctggaagcccgctttggtaatttcatcgcggttttcgctgccgcgcagcttcaccacctcaaaaccatcgccaatttccacgcccttcaccgcattgatgctcatcagcgcgtgcgcgatatcggcatccagacggtcgaataccggctcgcccagtcccggcggtacgccatcggccaccacggtgaccttcgccccgatggagtcgccctcttttttcaggccgcgcatcagttcatcaagcgcttcgattttgtccggatccgggcagaagaacgggttctgctctacctgatcccacgcttttatcgccagcgggatatcgcccatctgggtcaggcaaccgcgaatcacaataccaaatttcgcggcgaggaatttcttggcaatcgcccctgcggccacgcgcatggcggtttcacgcgcagaggaacgaccgccgccgcgatagtcgcgcaggccatatttctgctcgtaggtgtagtcagcgtgtcccgggcggaaaacgtccttaatggcgccgtagtcctgagaacgctggtcggtattctcaatcagcaggccaatgctggtcccggtggtcaccccctcgaatacgccggagaggatcttcacctggtccggctcgcggcgctgggtggtatagcgtgaggttcccggacgacggcgatcgagatcgtgctggagatcggcttcggttagcggaatgcctggcggcacgccgtcaacgatgcagcccagcgccaggccatgcgactcgccgaacgtcgtgacgcgaaagagttgtccaattgtgtttcctgccatcacggctccgtttttgtcgttatgtttgcgtgttgttttagtctttataaataccgaaatgcgcgcgggcggcaatcagctgcggtttagtcagcataaagacgccatcgccgccgttttcaaactccagccaggtaaatggcacgtcaggatattgctccatcagatgtaccatgctgttaccgacttcacaaatcaggataccgtcatcgctgagataatccggcgcgcaggcgaggatccggcgggttaacttcagaccatcgctaccggaagccagccccaggaccggttcatggcgatattcacccggcaggtcggacatatcttcttcatcgacgtacggcggattggtcacgatcagatcgtattgcaccttcggcagatcgcggaacagatcggagcgaatcggcgtaacgttatgaattaagccgtgatcttccacgttctgctcggtaacggccagcgcgtcaggggaaatatccaccgcatcgacttccgcttccgggaaagcgtaagcgcaggcgatagcgatacagccgctgccggtgcacatatcaaggatgtgctgcggatagtggtcaatcaggccggaaaaatggttgttaatgagttcgccaatcggcgagcgcggcaccagcacgcgttcatcgacgtaaaactcatggccgcagaaccaggctttgttggtcaaataagcgaccggaatgcgctcgttaatacggcgaatgacgcgctcaacgatgcgatgtttttcgctggaagtcagacgcgcggtacgcatatcttccggaatatcaagcggcagatacagcgaaggcatcaccagctgtacggcttcatcccacgggttatcggtgccgtgtccgtaccagatatttgcagcgctgaagcggcttaccgcccaacgcagcatgtcctgaatggtatgaagctcattcacggcttcatcaacaaaaattttatccacgctatcccccagggcacgctctgctataaattcggcggctagtttgccacgaagacggggataaatcagcattcttacgtcaggcggagggggaaaaataggttttccttgcctggatgcgtggcgagtcgggtaaactaccgacaaagaaaaaatgagatcagataatgaaaaagaaaacatcgctaagcgaggaggatcaggcattgttccggcagctgatgaccggcacgcgtcagattaagcaggacaccatcgttcatcgcccgcagcgtaaaaaaatcgctgaagtaccgcccaagcggctgctccaggagcaggcggataacagccactatttttccgatgagtttcagccgctgctgaataccgaagggtcggttaagtatgtgcgctcggacgtcagccattttgagctgaaaaagctgcgtcggggtgattattcgccggagctgtttctcgacctgcacggtttaacccagcagcaggccaagcaggaactgggagccttgattgccgcctgccgtcgcgagcacgtattctgcgccagcgtgatgcacgggcatggaaagcatattcttaaacagcaaacgccgctgtggctggcccagcacccgcatattatggcgtttcatcaggcaccaaaagagtacggcggagacgccgcactgctggtactgattgaagttgaagagtggcaaccgccggagcttccgtaaacgtcagccccggagggaatcagatagccttcgccatcttcaaattgcaggggctcatttgccagttgaattcgcctttgccgctggcatcaagcgtgacgcaggcaatcgccgaagtggtgaacatcgggggagtttcccccgggcacagctctgagacgaggtaccccaccagagggaggtgagacacgaccagcgccgtcgccacaccttcattcgccagcgcctgcagataagcgctaaccatgccaacgtcgccgcacggcgtgagttccggcatcacgtcgacatcttttggcagattcatgcactccccaacaatttccagcgtctgttctgcacgcaggtagggactcacaagaacccgctcaatatccactttttgacctttcagccaggtagccatctgacgagactcatcgcaaccgcagacggttaatggacgaaccgagtcactggctgcatcgagggcagcgtcgccgtgacgcatgataaaaacttgcatattgcaccgcttttgttaaccagaagcaccgcggtcttacccacgtagacgatacgcaggtgacccggtggccgggcattgtgcctgatccattcaacgaatgaaacgctgttttttacctcaatggcgtaagtatagtcaactattgcttacaaaatcgccaaagcgcagcgccgttcattaccggatttaccttctttgaccacaacttaggtcgtacgttcctcagcgggccaaaaggtcgccccctgctcggccatgtgtaacaaagtgtcacatggtgtaaaacgcgggccgtactgagcagccaggcgctgcaatatcgcggcgacctcccccgctcccagggtatccatatagcggaacgggccgccaagaaacggcggaaaaccaatgccaaatacggcgccgatatcaccatcgcgggcgctgcgaaccactcgctcatcgaagcagcgcgccgcttcgttaagcatcatcatcacgcagcgttccgccacctgctgcgcggacaagcgcgcctgcggtgaggaaatacccaataaagcgtagattgcaggatcgggccgttttttgcttttacgcccttttgccgcataaagatagaaaccccggttattttttctccctttgcgatcgtcattcagaatcgagctaatgatgtttgcaggcgggctaaaacgatctccccatgcggcctccagcaccgggataattttggtaccggtatcgattcccacttcatcaaggagctgaatagggccaaccggaaaaccgaatttaaccaaagcgttatcaatatgctctaccggctcgccttccatcaacaggcgcatggcttcatttatgtagggggccagaatgcggttaacataaaagcccgctttatcggcgacgacaatcggcgttttaccctgcagtttcgccagcttaaccgccgtcgcaattgtttgccgatccgtaccactatgtggaatcacctccaccagcggcattttgtctaccgggctaaagaagtgaagcccgatgacccgctgcggcctgcttgcatgcgccgcgatctcgccgatcggtaaagacgaggtgttagaagcaaagatcgtctccgggcggcagtgctgttcaacttcgctgaccatcttctgcttgagcgtaaggtcttcaaacaccgcttcgatcaccacatcgcgatgtgcaaatccctgataatccagcgaaccggatattaaccccatctggcgatcgcgctcgctggcgcgcagatagcggcgacgcacctgtttatcgagcagatcccagctgtacttcagcgcgtgatttatcccgcgcggctggatgtccttaatgcgtaccggtaatccgcctttgcaggcggtgacgtaagcgataccgccccccatgagtcctccgcccagaatgcccacgctgcgcagcgcgacgggatcagcatccgcgccgcgatcttttttcagatcggtgctggcgaaaaaaatcgaccgtagcgcctgcgattgcggcgtcatcgccagctcgccaaaagcgcgggcctcctcggcgtatccgctgctgcagccctgcgccagtccggtttcaatcacctgcagaatgcgctcagttgccgggtagttcccctgggttttgtgatgcgtctttttcgcgaccagacgaaacagcaggctgcggccaagcgggcctgcgagaatacgttcgcgcgccggaacagcgcggcttgccgggcgacctttgagcgccagttcaatcgcggtttgcagcaggatagtctgcggcaccacctcatcaaccagccctgccttcagggcctgacgcgggcgaagctgcttaccggtcaggatcatctccagcgcgccgctgacgccaattaatcgcggtagacgctgagttccgccagagccgggcagcagccccagctgaacttccgggaggccaagccgggttttatcgtcatcgctgcatacccgcccgtggcaggccagcgccagctcaaggccgccgcccaggcatgcgccgtggatagcggcaatcaccggaatcgacagaccgtggatctcggccatgatttgctgaccctgacgggcaagcgcctccgcttcctgcgcggaatggcagcgggcaatcatattgatatccgccccggcgataaagttatccgcttttgccgagatgaacaccgcgccgcgcagctccttattgtcgcggatctggcggatgatcccccgtacctcgctggcgaactcagctttcagggtattcattttttcaccggacgcgtcaatggtgatgacggcgatattgtccgggcgaacctcaagcgtaaatgccgatacggtttccattattcggcctccagaaccatcgctgaacccaacccacccgccgcgcaggcggtgaccagaccaaatccgccgccgcgccgccgcagttcatgcagcgtttgggtaatcattcgcgcgccggtggcggcaaagggatgaccgtaggcaatcgagccgccaagcacgttaaatttgctctcgtccacttccccggtagcctgagagcggccaagcacttcgcgggcaaagcgattgctggccatacattgcaggttggccagcgtttgcgcggcaaaagcttcatgcatatcaatcagggtcaaatcagccagcgtcagccccgctctttccagcgccagcggcgtcgaccacgccgggcccagcagcatatcctggcgaacatcaatcgcggtgaaagcgtagcttcgcagatagcccagcggaacaaggcccagctctttagcccgggattcggtcatcaggatcaccgccgccgctccatcggttagcggcgtactgttcgcggcggttacgctcccgtgttgacgatcgaaggccgggcgtaacttttggtaatccgccagggttgaatttttacgaatattattatcctgttccagcggttcacggaacggcggcgtgtacgccgtcatcacttctgccgagagcttaccttcctcccaggctctggcggcaagctggtgtgaacgcagcgccagcgcatcctgccgttcgcgcgtgatagcccacgttttcgccatctgctcggcggtatcgcccatccgcaggccggttgagtattcggcaaccgctggcggtacgggcagaaggtcgcgcaaacgcagccgagaaaatagcttcagacgctgtcccagggtgcgagctttgttggcatcaacaagcgttcgggcgagttttttgctgacgccaataggtaatacggaagaggagtcggctccgccggcgatacccgcgcgaatagtgcctgccatcaggctttccgcgacgttggctaccgcctgaaagctggtcgcacaggcgcggctgacgctgtaggcatcggtatgcacgctcataccggtccccagcacaatttcccgggcgatgttcggcgcttccggcatctgcaccacctggccaaataccagctggtctattatgtccgcggggatgttgctgcgagccagcatttcgccgaccaccagcttacctaaatcaacggccggcacgccgtgaaaagccgtcgcctgtcgggcaaacggagtacgtaaaccgctgactatcgcgatacgatcgccctggcgggtgactagcggtaatgcctgactcataacgctcccctgttaaccgataaaacaaagtggtctgacctgataacagttttaactaatattttacattaagccaatcggggaaccgaaaaagtgggagccaaaacacattgattagaaaaggtaacgcccctgccatgaggggcattaagggaaggattaacgcaagccgagctggaaaatcagggtttcagcttcacagctgaacacgaaatcgatatccagcttcacgccaccatcaacgtcggtaaaggtcggggtgattttgcacggctctgattcaacgttacgcgctctttcgcttaatgcggcgagcgtttcttcggcttcggcacggttcgcaaacacgcggctataagaggcggtgcaatcggtgttgtccataatggtgccaacatccatacagcagcaaaccggggtttcatcagcactgcatttactcatcgtagatttcctctgtatatgcactcaaggtgccagacaaataatgtgcgtattttacgccccggacatgcctgcctccagtcgttaatggcgacaaacgggataagtgaccgaaatcacacttaaaaatgatccaaaacaaaaagcacctactttgggtaacaggtacccgggcaaatttgccaactggatcgcgtttcttagatcacaattgaaaaaacttataaacaaacttgcaacatatcatctggtcagacctatactcagcgcactggtctgatttctctgtcgtaaagcagaccctacacttcgcgctcctgttacagcatgtaacattgtttaaataaaaataactctatgaggttatgggcatgagccagaaaacccgccttacccaatctgcccttgcagtggctgtagcactcgtttcaacccaggcctggtcagcaggctttcagctaaacgaattctcttcatcgggccttggtcgcgcctattcaggtgaaggcgctattgctgatgatgcgggaaacgccagtcgtaacccggcgttaatcatgatgttcgaccgtccaaccttctccggcggcgctattttcgtcgatcctgatgtcaacgtcaccggtagttcagttatcggtaatgacgccagccaggacaatattgcgcctaccgcatgggtgccaaatctgcacttcgtggcgccgattaacgaccagttcggttggggagcttccctgacctctaactatggtttagccaccgagttcaacaacgattttgccgcgggctcgatgggcggtaccaccgatctcgaaacgctcaacctgaacctgagcggcgcttatcgtctcaacgaccactggagttttggtctgggctttgacgccgtgtacgctcgagcaaaattagagcgctatgcgggtgatttaccggaaattatcggcgcacagctaccgggaatggtgaaagccggcaaactctccccggctcaggctgcggccatcggtcaacaggccggcggtatcagccgcgacacccaaattgctcgtctgaagggtgatgaatggggctttggctggaatgccggtattttatatgaagtcgataaaaacaaccgctacggcttaacctaccgctctgaagtcaaagttgattttgacggggattacaagagcagcctgccgtcttccctcaaccccatcaactccgctctgggcctgggcctgccgtacggcaccggcggctccacgattggcggttctctgacgttgaatctgccagaaatgtgggaagtatcaggttataaccgcgtggcgccaaaatgggccgttcactacagccttgcctataccagctggagccagttccaggagctgaaagcgaccaaaaccagcggtggtgaaacgctgttctacaaggacgaaggttttaaagattcctaccgtatcgcgctgggtacgacctattaccacgacgataactggaccttccgtaccggtatcgcctttgatgatagcccggtcccggcttccaatcgctctatctctattccggaccaggatcgcctgtggctcagcgccggtacgacttacgcctttaataaagatgcctcagtcgacgtcggtgtgtcttatatgcacggtcagcacgttgaatttacagaagggccgtatacctttaaatcagaaggtaaagcctggctgtacggcgcgaacttcaactaccgtttctgataatgtgaaaccacaaaaaagggtgaacatgatgttcaccctttttactttctacccgtcggttactgtgaatcgatatctttgagatcgccctcaatcgcctgcgcgttcgggttttcattcggggaaagtttaccgccgttggcgataaagtcgtgacgctggaagtaggcttcacgcattaaaatatacggatcggaggactgacggagcaagccgtctgaatccagcagctgcgcgcgcgtttcaacgccctcaaccatccatttgccgatagacatcggccatgtcagccaggaaagaaccggatacaggtcatcagccatatcgccaccctcatcacgcagggtgaagctgccgtagaaaggcaactgcacatatggaccatagccaacgccatagtgacccagcgtgctaccgaagcgggcaggctcaacgcgctgtagtttcggattcgccatcccggccacatcaaccaggccacccatcccaaggatggtgttcaggaagaaacgcgtaaagtgcaccattcctttatagggatcgcctttcaggaaggagttcaccattaccgccggctcttcgaggttgctggtaaaattactcagcccgttacgcgccggctgcggaacgtaatcacgccacgccaccgcgacggggcgaaggacatagggatcgacaacgttgaagttgaagttgaacatggtacggttaaagccttcaagcggatctgaacgcccctgcggccgatcgccagaactcgaactggcgcatcccaccagcaatgtggcgccaagcgcaagcgccgacaggcgaaaattcataggtgtctccctgttaatttaagctatcgctgggggttatcgggggacagctgcctccataaagatatcgcccgtaagcatgtgcctgctttcagcatagccttttttagcatcattgttggtgtcccgattctatacacattttgcaatttccgtattgctaatcttgtcattgtgaagaatttaggagcttatccgacccgaacagccgaaaccgctctaggattataataaagacccgccgttgaggaaaagttatgaaaccgcaaactcaccatgataatgaggatgttgaagtagagagtgaagaaaagcagaatggtgaagaaattgaggttgatgaagaacgcctgccttcacaggcgatggccactcatgaagtaattcgccaggagggcgagaaagagctcgaacgcgatgccatggcgctattatggtcagcgattgccgccggactttcgatgggcgcctcgctggtcgccaaggcatcttccatgtccacctgagcgaacttcccggcggcttcttgctggaaaatcttggttatacctttggttttgtgatcgtcattctcgctcgccaacagctgtttaccgagaacaccgtcaccgccgtcctgcctattatgcataaacccactccaggcaacatcggcctgctgttacgtttatgggggattgtgctggcaggtaacttaatcgggaccgctatcgcggcctgggcgttcgatgttatgcctgtgttcgatgagcccactcgcgaagcctttcttaaaattagcctgaaggtcatgcaaaacccgccgctggagatgtttgccaatgcaattatctccggttggctggtcgccaccatggtgtggatgtttcctgccgcaggttctgcaaagattgtcgtcatcattctgatgacctggcttatcgccctcgcggacaccacgcatattgtggttggcagcgtcgagattttctacctggtatttaacgggacgctaccgtggcaggaatttatctggccttttgctctgccaacgcttgccggcaacatatgcggcgggacctttattttcgctttactaagccatgcccagattcgcaatgacatgagtcatgagaagaaagctcgtgcagccgaggaggccaaaaagcgctaaatggctatagattaagcagttggcctgtacaagcttaacgagcgccgaaaataacgctataatcccggcgcttcgtccccttagttaaatggatataacgagcccctcctaagggctagttgcaggttcgattcctgcaggggacacttttgaattattcacctccgttcacagcattcgtttaatcatcaccaccgcagaacaacgccagccccgaagcagatgaatcacagaggtttatcgattcctgcatagatctcatcaagttgctgtagccggtcttcgtatgatttcgtcaaacaacggctgtcgctgccgcatttctgccggctatggagccatgttttttgtgcatccatcatctcgccacgcgtccccattggaaaaagcccccgcagaaactcatacttcgtcgccatcaccacgtccatatcgttcaggctccggttagcgcagatagccttttcatccgcctgcgtcgctttctgacaatcaaaactcgcggaataccccgctatcggatacagcacagcaatagtcatcagtacttctcttatcttcatacgcgctccatttccgcactcccgccatttgtgctacccgtttataacgagtgcccctcgctacgaagcccagcgtaagcttttgacacactgacgctctgaactatccgtgctgtcgataattatagttaatccaccttaaggctcccattgggttagccgcgcgccttccgcaaaatcttttttcccgacgataaaacgccccacagcctggctgaagtatcggtcagaattgcatcaacgcgggtcacggtatcgcttgccagagagggaaaaaatttttctaccgtaacgcttttcataattatgtctggcctgatattccatatataaattcaattccatttaaaatcaattacatatattaaattttaacattcacagtagttatcattgttgattgtttccctgcgttacgattcgcaaaacaatgccggtagataaatccctgacgtcacgtattcttcccgctgccggatgcgctgaactgctgttctttcagtatcagcgttgcttaaaagcagcgcgtccggcggtttatggcggatgaaaagctatcttctcagccatccgcttcatattgcggcaggatgtctgcgacaagaatcgggttctgtacgggacttgcggacagcctgttgccttacctaaattggttatacggatagatatgatgaaaaaactcgcaatggcactgggtatctgtgcgcttatggcttgtggcgctgccagcgcggcaaatggtcaggtcgtttcaaaagctaagtcagcctgccagaataacgcgacgcagtgcgcccaggcaaagtccacggcaaaagcggatgcgcagaaagaagcaaaagcagccaaagacgcctgtgctaaaaaccaggcagcctgcgacaacgcaaaaactgcggccaaaaacgcagtgaaaaagtaaaaacagtacggtgggggtataaccccaccgtactttcacaaatatgctccgcacagtacgcaagcccgattccagcaagggaaattctgttttgcttatgacagatatagcaggattctttgcacacgagcccgcatcaaaacaagcattgacacgatacaggcctgacccatggcgatccctcttctgtccgttcaccagccgcatcgtctatccgaggattttcaagcaggttccgctttcgatgaatcatcagccttttgactcaatatcgcctcctgcattattagtaatttcatataattattggaaattcaatgcaccaacaaaataattaaaagtcattaattcatcacaaggataatgagtactgcggatttttttagccgcgatacatttaattattacaggaaagctgataagatgcattagagataatattctgaccagattcaacatgacatgccaatatcaaagtttgatataaaacatctgttttgataaatattttgtatgaatctaaatcgtcgcaacgtcgatagaggtcaatttaggaaaaccataaccccctatttttcataagatgatatagaccatggaaagaaaagaaagaaacatatggaaactaaacaatctcccccccctggaatactgttcaatatctcgcgctaaaaaattattgaattgtgaaatagaagatctgcttcattggcatgatattggcgcgataagcctgtgcataaaagtaggtaaaattaacggaacattaaaaggtgcgttccaacatgaccagagcagtaataatctctattttcttaacgcacccaatgttgatgaattgagtatcagcgaaagatcttggtcacggcattccaaaattaacaaaatttttaaatttaatgatagtgaagcaaatcaggaagcccaatatggtatgccgattacccagctgaaactccgggtttccgtctccgggttatggtactgccacacaagaaatttaatggagatcttagaaacgcctgatggcatgattaccgaggagaggataagcatcatatcaccggccaccaatgtcctcttctgtcacttcataccggacgaggatgagagaccaaccatcacgctgagtaagctttacatcacaagtcaggcgattgagaaaatttatgaacataccatcagcagtcgccctctcgaactttctgaaaaagccttagatttacctgaggagcaagatatggtgacaccctcaacgattatgcaaaataagttgctcattgaatttatcaatcacatcatccaatccaatccacattttggcgataacatgcttaacgcgactgaaaacaaaaaaataaaatatttaatagggctatggataaactcaggtctgaaggcgtggtttccagctacggcagcattaatcttccgacgtcagaatatacgttcgaatgatacttctttaatttaattatatcagaatgaatcatttcagcgctataggtacagggcgcgcaacgcagtagcaaatgtgaaatgcatttcaatatgaattcatatatacatctgacttcacaataaaactgttctctataaacgctcctgatgtttatgaatcacttcatatacagcgaatcaacatgacgttaagtctccgccagtggattcctgaaaaccctgccctgcgctcaatattgacgcagcctgatgtgccattggtataaactctcgggtcgcggcgctttgccaggccccctttcgctgtatcaaacacgcggttctttccagtaatgatggcacgagttcgatcgcggttaaatcgtcacgcccctgaacaatagcagcaggaagcaaggttgccaacgacgtgcgttcaaccacggtcagcactgcgctaatcgagttggcctccatctgcactttcggttgaataccgcgctgtcggcagtcgcgatcgatttgttcgcgagtagcaaaagcgcagcttagcagaatcagtgacgcctgattgagcgccgtcagcgccacacgacgggtcgccgccagaggatgagagcggccaaccaccagcgccagggtttcagagagcagcggctgagacacaatatcccgcgaatcgctaccgtcgaaagcgatcccgatatccagctcatcattgagcagcagagtctccattcgatcctgcgccagctcttgtatatccagcgttatattcgggtaacgttgataaaacgaagccaccagcggccccataaaataatgggtaaaggttggcatcatcgccacacgtaaggtgccgcgctgcaaatcgtcaacatcatggagcgcgcgctgcccctcggccagttcccgtaaagcccggcgcgcataaattaaccagaccttgccggcgtccgtcaggcaagtgttgcgcccgctgcgatcaaaaagccgtactcccagcgtctcttccagctgtcgaatctgctgcgacaaagccggctgtgaaacatgcaggatggctgccgctcgcgtaaagccgccgtgttcagcaacggcaatgaagtagttgaggtgtcgcggcagcatgaattcatccataagaaattcaaatgaactcaatcataattaagtattttaacttatgaaataagttacgtactctgctcgcgattctttaccaaacgccacaggagatcggcatgagttgcctcaataccttccccacagcgaaacaaacgccggctactcaacgatgaacctgacgcaacgtaatggcacgatgctgctggtgctggtgcttatcggtatcaatatgcgtccgctgctgacctccgttggaccgctccttctgcagatccagcaggcaagcggcatgagcttcacgcttgcctctctgctcaccgcgctaccggtgatcgccatgggtctgctggcgctagccggcggctggattaaccgtcatttcagcgagcgtcaaagtatctccctcagcctgttaacgatcgtcgccggggctttacttcgcgaactggcgccgcagagcgcgctattactcagcagcgcgctccttggcggaatcggcattggtattattcaggcgcttattcccgcggtgataaagcgtctttttcatcgtcggacgccgcaggtgatgggggtctggtccgcggcgctgatgggcggcggcggcctgggcgccgcattcacgccgtggctggcgcagcatagcgctatctggtatcacgcgcttgcgtggtgggcgttacccgccgccgccgcgctcctctgctggtggccgctaagccgaacgttacccgcccggacgccatcaacaacccgggtcacgctttttcgccatcgtcgcgcgtggacgcttagcctctattttggtttgatcaacggcggctatgccagcctgattgcctggctgccgccttactatatgcagtcgggctacagcgcgcagttcagcggtaccctgctggcgttaatgaccatcggccagaccggcggagcgctcctgctgcccatcctggccagacatgaggatcgacgaacgcttctgatgctggcattggccttacagcttgtcggcttctgcggttttatctggctaccgcagcaggtaccgcttgtctgggccatctgctgcggtattgggcttggcggcgcatttccgctgtgtctggtcctggcgctcgatcacgccaggcaccccgccattgcgggccgactggtcgcgtttatgcagggagtgggctttattgtcgccgggctttccccctggctgtcgggactgctgcggagtttaagcggcaattaccagctcgactggatgcttcacgccgcctgcgtcctggccttaatggccataacgctgcgtttcgctcccgcacgctacccgcaagagtggcaacatcaggattcagccgctcgctaaacccgttatctcctcatgcgggatagttaactcctcccgcattcaggcagaaaaaagcacaaaatcaaacaactatatcagtacaaaaactgttgttaatgaccgtcgccagaatgaaatttaataccgaatgaaattaatgtgtcgccgaatcacgacactcgtaagtaactaaaaattaataaaaaaatggctcttgtttccctcattttttaggcgtacattagcgccatctggagccgtttacgctcagaatttacagctaccgcccgctgataaagcgtcgttttcgtgagcgatagctgagcaggcaatgaagagcaaattcatttaaggcgtctcgccgagagcgcggagtgatgagtcgtgaaatatttcttaatgggcatttcttttatggtcatcgtttgggccggtactttcgccctgatgatctagctttaacggtgttaaaaaaaggagcctttcggctcctttttttattcgtgactttcgctggtcaacttagccgacgcgggaagcagcccgtcggcacggaacatcgattttatgccccgcaccgcctggcggatacgatcgcggttctcaattaacgcgaagcgtacatgggtatcgccatagtctccaaagccaatgcccggagaaacgcagacttttgcatcctgcagcagctttttagcaaactccagtgagcccatcgccgcatactgctctgggatcttcgcccagacatacattgacgccttcggacattccaccatccatccggcctcatgcaaccctttcaccagcacatcgcgacgacgtttatactgctcggcaatgtcgcgaacgcactgctgatcgccttcaagcgcggcaatcgccgcaacctgtagaggggtgaaagtgccgtaatcgtgatagcttttaatgcgcgccagcgcattaaccaacgttttgttaccgaccataaagccgatacgccagcccgccatattatagcttttagagagcgtaaagaattcgacggcgacatcgcgcgcgccggggacctgcatgatagagggcgctttccagccatcgtaaacaatatcggcataggccagatcgtgcaccaccagcacgtcataacgcttcgccagcgccacgactttctcaaagaactccagttcgacgcactgtgcggtcgggttggaggggaaaccgaggatcatcattttcggcttcgggtaactctcacgaatcgcgcgctcaagctcgttgaagaaatccacgccttcgaccagaggtaccgaacgtacctgggctccggcaatcaccgcaccgtaaatatggatgggatagctgggatttggcaccagtacggtatcgccatggtcaagcgtcgccagcatcagatgcgcgagcccctcttttgaaccaatggtgactatcgcttctgattccggatcgatctcaacgttatagcgctcttgataccagcgagaaatcgcccggcgcaggcgcggaatgccgcgggaagtagaatagccgtgggtatcgggacgctgggcaacggtgcagagtttctcaacgatatgcggcggagtggcgccatcggggttacccatgctgaaatcaataatatcttcgccgcggcgtcgcgcagccatttttagttcagcagtgatattaaaaacgtaaggggggagacgatcgatacgcgtaaaacggcgttcaggactgaattcagccatagattcctcggattaacgttagcgcccggaccgtccgagcgacgctgctgcctgtgcagcacgtttagaaaataacccgaaaattttcctgctgtcgagaggggcagagaaaaataatttctggcgataaaaacgggcatcagtacgactaaatacggcagcaacgttctttcccctcctcgcctactacatcaaaattaacatgctgatatctttaattttacttaaatgcttgctcatccgtagacgctattgaatcgcgggtgtttgttattaatccccttttatttgtaagacttttccctattcatgccttcagctggccttctgccacgaggttttctatcatgttgctttctcgcgattaacacggcgcacacatgcacgaaatatttactatgctgctggcggtttttgaccgcgcggcattaatgctgatttgtctctttttcctcattcgcctgcgcctgtttcgtgaacttctgcataaatccgcgcacacccctaaagaattgctggccgttaccgcgatcttctctctctttgccctctttagcacctggtcaggcgtaccggtcgagggatcgctggtcaacgtgcgtattatcgcggtcatgtccggcgggatcctgttcggcccgtgggttggggctattgtcggcgcgatcgccggcgtacatcgctacctgattgatattgatggcgtcaccgccgtcccctgctttattaccagcattgtcgccggtctgctctctggttttattggtcgtaaagtgccgaaagcccagcgctggaaagcggggatcctcgccgggatgctatgcgaaaccttaaccatgattctcgtgatcgtgtgggcgccttcattcgcgctggggatagacatcgtgtctaagattggtattccgatgatccttggcagcgtatgtatcggctttatcgttttgctggtgcagagcgttgagggggaaaaggaagccagcgccgcccgtcaggcaaaactggcgctcgacatcgccaacaaaacgctcccgctatttcgccacgtcaacagcgagtccctgcgtcaggtatgcgacattatccgccgcgatatcagtgccgatgccgtcgcgattaccaatacccaacacgtgatggcctacgtcggcgtcggggaaatcaactaccgcgataacgatgactttatcagcccgacgacgcaacaggcgatccgctatggaaaaatcattattaaaaacaatgatgaggctcatcggacgccggaaatacactctatgctggtcattccgctgtgggaaaaaggcgtcgtcaccggtacgctaaaaatctattactgccacgcgcaccgcatcacctcctcattgcaggaaatggcggtaggcctgtcgcaaatcatctctacgcagctggaggtttcccgcgctgaacagctgcgtgaaatggccaataaagccgagctgcgggcgctgcaaagcaaaatcaatccccatttcttatttaatgcgctgaacgccatttcatcgtcgattcgcatgaatccggacaccgcgcgtcagttaatttttaatttgtcgcgctatttacgctacaacattgaattaaaagatgatgaacagatagatatcaaaagggagctgtatcaaatcaaggattacatcgcgattgaacaggctcgcttcggcgacaagctgacggtgatttatgatattgatgatgaagtcagctttatgatccccagcctgctaattcagccgctggtggagaatgctatcgtccacgggattcagccctgcaaaggaaaaggcgtggtgaccattggcatcaatgagtgcgggaatcgggtacgaattagcgttcgcgatacggggaacggtatcgaccctgcggtggtagcgagggtagaggctgacgaaatgccgggaaataaaatcggtttactcaatgttcatcaccgggtcaagctactgtacggggaaggactgcatatccgacgcctgacgccggggaccgaaattgccttctatgtgccaacccaacacgcgccccaggtggctacggagtcgctgctgtcatgagcggagataaaatgaaggtcatcattgtggaagatgagttcctcgcgcagcaagagctcacctggttgattaacacccatagcgaaatggagattgttggcacctttgacgacggtctggatgtgctgaagtttttacagcacaacaaagtcgacgccatttttctcgatatcaatattccatctctggatggcgtactgctggcgcaaaacatcagccagttcgcgcataagccctttatcgtttttattaccgcgtggaaagagcatgcggtggaagcctttgagctggaggcgtttgattatattctcaagccctaccaggaatcgcgcattatcaacatgctgcaaaagctgaccggcgcctggcagcaacagcagcaggtcagcgccggtagcggggcagcggccaatccagccagggaaaacgacacgattaatctggttaaagatgaacggattatcgtcaccagcatccacgatatttactacgcggaagcgcatgaaaagatgacgttcgtttatacccgcaaggagtccttcgtgatgccgatgaatatcacggagttctgcaacaagctaccgacggcgcactttttccgctgtcaccgctcgtactgcgtcaacctgagcaaaattcgcgaaatcgaaccctggttcaacaacacctatattctgcggctacgcgaccttgagtttcaggttccggtaagccgcagcaaggtgaaagagtttcgccagctcatgcatctgtagaggatttacccgaataatcattttattcgggtaagagacggggcttacagaatctgtcccagagtctgacgcaagtgcgcgccggagcccagcagtcccggattgtcgtggacaatcagatagaccggaatatcctggacgaaggctttaaatcggcctttatcttcaaaaccgccgcgaaagccggaggctttgaagaattcaaggaagcgcggcacgataccgccagcaatatacacgccgccaaaggtgccgagggtcagcgccaggttaccgccaaatcggcccataatgacgcaaaacagcgacagcgcgcggcggcaatcgatgcaggtatcggccagcgcgcgttcggtcacatctttaggctgcagattttccggtagacgcccgtcagacttcacgatcgcatggtaaagattgaccaaccccggtccagataagacgcgttcagcggagacgtgccccagctcgctgcgcagctcttcgagaataatgccttcctcttcgctattaggggcgaaatccacatggccgccctcacccggcaggctcacccagcgcttatcaacgtgtaccagatgagcaacgcccagcccggtaccggcgccgtagacggcaatcggcttgccttccaccggttccgcgccgccaaactgaatcagatgttcagcttttagcatggggatcgccatcgataccgcggtaaaatcgttaatgatttccagatgcgagaaacccaggttctttttcatctcagcgatagaaaatgcccaggtgtggttggtcatcgccacccagtcaccggtaatcggacaggcgatggcaatacagccgtcttctacctggacgttatgctcttccagatagacctgaacaacggcttcaagactgggataatcgagcccggaataggtcttagcacgggagatctccccgcttgccagatcgcataacgccagacgagcattcgttccgccaacgtcccctactaaagcaaattttgtcattccgttacggctccgctaaagtcaaaatgattctttggcacactctaaattcatgacgtcctaacaacaacgaccaacgcataagcgccctttgtttagcgacctacgtcacagttaggctgtaatttatgaaattattgtgcggccgatcgtcaggccagctctttactttatcgtttcagcaccatttgcgccaacgaccttaacgcccccgggcaaagtagtgcgtcgaaaccttcagaaggatattttcatgctgcacccgcgcgccagaacgatgctgttgttatcaatacccgcaatcgtgattggtattgctgccagcctggtcttgattgtggcgatgaaaacggcagccatgctgcagaatattctctggagtagcctgcctggattgctgggcatgaacgccagcggccctttctggacgatagctatcctcaccggcaccggcatcgccgtgggtctggtcgtgcgttttagtcctggtcacgccggacccgatccggccaccgagtcactcattggcgcaccggtgagtcccggcgctctgcccggcctgctcgctgcgctgatcgtcggcctggcgggcggcgttagcctcgggccggagcatcctatcatggtgattaatatcgccctcacggtggcgcttggctcccgccttttcccgcgagtcagcgcgctggactggacgatcctggcgtcctccggcactatcggggcgctatttggcacgcctgttgccgcggcgctgatcttttcgcaaacgctgaacagcagtaacgatgtgccgctttgggaccgactcttcgcccccttacttgccgcggcggcgggctctctgaccaccgggctgtttttccaccccaacttttcgttacctattgcgcactacgagcggtggcagcttgtcgatatctttagcggggctatcgtgacgctgattgctattgccgtcggcatggttggcgtttggtgcttaccgcgcctgcacgcgctgatgcagcggctgaaaaatccgatcttaaccctcggtattggcggatttttattggggatcctgggcgtcgtcggcgggcatatcacgctgtttaaaggcctggatgaaatgcagcaattagccttcagccagacgttaaccgccagcgattacatgcttattgctttggtgaagctggcggcgctggtgctggcggccgcctgtggttttcgcggcggtcgaatttttccggcggtgttcgtcggcgtcgcgctaggcctgatgcttcacgcacacgtggatgccgtgccggcagccatcaccgtttcctgcgccatcctcggactgacgctggtagtgacgcgtgatggctggttgagcctgtttatggcagcggtcgtggtgcccgattccacgctgcttccgctgctgtgtatcgtcatgcttccggcctggctgctgctggccggtaaacccttgatgattgccaggaagcgtggagattaaacccggctgtttctctcttccagcgcctgagtgaccgtgcgcagaaagtcgggaatatccatttttggcagcatcacctccaccagcgtcagcctgtctgaggcgacgctgctattcatcgcttcctgcagttcgtgggtgcgcgtcactcgccagcatcgggaagggacatcgggcgcaaaagcgtcaggcaggcgattccagtcccagagcgcaatatcgttatagcgctgctcggggccgtgaattgcgcgctcgaccgtatagccttcgttattgagcaacaggatcagcgggcgctgcttgtctctgagcatcgaccccagctcctgaatagttaactgcgcagcgccatcgccaacaatcagcaccacccttctgtccgctgccgcgatttgcgccccgtaggctgccggaagggtaaagcctatcgatccccatagcggctggacaatcagcgttgcgtcagggggcagcttaagcgcggcggcgccaaaagcggccgtcccctgatcggcaaggataatatctcccgggcgcagctgtttctgcaccgtactccagaagtttttctgcgtcaggctcccctctggcgcgccgctgacgcccggcgcctgaacatttggcgcatgccattctgccgccaggctggcagagagttcgattaagacatccagcgccttttccatcggtacccggctaaaccagcgatcgccaacccgcacggcgaagggctggacttctatcgttttttcctgcggaaggtgttgggtgaaaccggcggtaatggtatcggtaaaacgcgtgccgacgcagataatggtatccgcgctttcaatggcatcgcgggtatcctctgtgctggctatcccgctgtaagtcccgacgaacccaggctgctgctcatcaaaaagccctttgcccatcagcatcgtggcgtaagcaaccggcaccttcgccacccactctcgcagagcgttttgtagcccatagcgctgggcgagaaaatccgccagcagcgatacgcgacggctgcttctgagcatccgctcggcgtgctcgcggaaccccgccagctggttctcgtcggcgggcagcgtgtgaataagcaagcggtgagctggcggggtggcctttgctttggccacatcggccggcagcatgagataaccggggcgatgctgggtcagcatttcactcagtacccggtctatttcatggcaggcatttcccgctgcgagcaccgcctgagagcaggtaatatgttcactcatacgcgaaaagtggctgaaatcaccgtcgccaagcgtatggtgcagcagctcgccgcgctgctgtgcgccggtacagggagcgccgacgatatgcaggaccggtacatgctcagcgtagctcccggcaacgccgttgagcgcgctcagttcaccgacgccataggtggtcaacagcgcgcccgcgcccttaatgcgcgcatagccatcggcggcataggcggcgtttagctcgttagcacagcctacccaccctaagctctgctgcgcgataacgctgtcgagaaactgtaaattgtaatcacccggtacgccaaacaagcggtctatgccgcaatctacgagacgatccagcagataatcgccaatggtataagtcggttgcatatccttactctcctctcgtgcaggtaagttgagtattgaataagcaggtgcgctgtccagattgcgctcaacaatggcggtggaaagcaaaatttacgccttcagggtgtgtactccgcggcaaacattctttagtgtaaacgtatacacaaccctgttttatctgcggaggaagtatggtttaccaggcaaacgccacgcgatatcaaacgatggagtaccgccgctgcggtcatagcggactaaagctaccggcgatttctcttgggctttggcacaattttggcgacgaaacgcgggtggaaaccagccgccagcttctgcgtcacgcattcgatctcggcatgactcattttgatttagccaacaactatgggccaccgccgggttcggcggagagtcattttggccgcatcctgaaagaggattttttgccctatcgcgatgaactgattatctccagtaaagccggttacaccatgtgggacggcccctatggcgactggggatcgcgcaagtacctgattgccagcctcgaccagagccttaagcgaatgggtctcgactatgtcgacatcttctaccatcaccgccccgatcccgaaacgccgctgcgggaaaccatgggcgcgctggaccacatcgtccgccaggggaaagcgctctacgtcggattatcgaattatccgctcgaacaggcccgggaagccgtcaatatccttaacgatctcggcacgccgtgtctgattcatcagcccaaatattcgatgtttgaacgctgggtcgaggaggggttactcgatttcctgcagagcgcgggggtgggaagtatagcgttttcaccgcttgcgggcggccagctcaccaaccgttacctgcacggtatccctgcagactcccgcgccgccagcggcagccggttcctgcaaccggagcagcttactgaaagcaagctggaaaagattagtcagttgaatacgctggccgaatcccgcgggcaaaagctctcacagatggcgctggcctgggtactgcgcgatgagaaagtgacgtcggtactgattggcgccagtaaaacttcgcagctcgacgatgcggttggcatgctggaaaaccgccatttcagcgccgaagaacgggccaccattgacgcgatccttgcggtgtaaattcattgttactttagcaaaaagtgctctcacttgcgatttaggagttcctccgatgcggcggggctttaccgccccgtaatatcaggttaacaggccgacaacggccccgatcgtgaaggagaagagtatgttcaggtcactgattttggctgcagtgcttctggcttcagcgccattggtcgctaacgctggtgaaatcaccctgttgccatcaataaaattacaaattggcgatcgcgacaattacggtaactactgggacggtggcggctggcgcgaccgtgattactggcgtcgacactatgagtggcgcgataaccgctggcgccgtcacgacaacggctggcatcgcggctgggataaaggtaaagcctacgaacgcggctatcgcgaaggctggaaagatcgcgatgaccgacgcggcggctgggggcgtgggccaggcggcggacgcggacatggccacggccatcattaatcgcaaaagggagccattcggctccctttttcatcgtcacgcttaactgaatatcgttccaataatcagccagccgttaagcagcacaacgaccgcaactatcccccaccccagcagttttacccaccgggaattggccaggtcgcccattaaccgggaatcgctggtgaatatcagcagcggcaccagcgcgagggcgataccaaaactcagcaatacctggctcatcaccagaatacgcgtgggatccagccccattaaaatgacgataaacgacggcagcatggtgatcgcccggcgaaaccacagcgggatatggaagcggataaagccctgcattaccacctgccctgccagggttcccacaaccgtggaggataaacccgccgctatcaggctcagaccaaagatggtagctgccgcgtggctcagtaagggctccagcgtcagataggcctgatcgaggtcggcaatcccggtgtggccgttaaagtggaaggcggcggcggcggtcgccatcatggccaggttaacaaaacccgcgatggtcatggcgatggcgacatcccagcgcgtggcgttatagcgctctttgcgcgtccccccgtgcaggtgctgagtgagcgatgagtgtaagtagataacatgcggcatgatggtcgcccccaataccccggcggcaagaaacaccgcttcgctggtcggcagtgaaggaacgatcatccctttcgccagcggtgccagcgcgggctgggagaagataagctcaacgacatacgctgcggcgacaaacaacagcagcccgcctatcactttttccagcggcttttgaccgcgacgctgcagcatcagaatcaggaacgtcgcaattccggtcaatacagcgccctgaagcaatgacacgccgagcaccagcttaaatccgatagccgcgccaataaactcggcaagatcggtcgccatagcgataatttcggcctgcacccagtagaaccacaccacaggacgcgggtagtggtcgcgaatttgctccgccagatttttaccggtggcgatgcccagcttcgccgacatcacctgaatcagcatcgccatcaggttagcccataccaccacccacagcagctggtagccaaagctggcgccggcctgaatgttggtggcgaagttacccggatcgatatagccaatggcagcaatgaacgccggccccatcagggcgagcttaatcttgcgcgctgcgcgaccgctgctattctcaacgcgactgttggtcattttctgcctctggaaatatagcctttgctatgttttatgctatcaaaatgcgaatgattatcaagttcatttggagcgatgataatgattgctgtgataggagagaacgatagcgggttggcaacggaaaaccggggaactgataaacgcttttaattaatcaccagaatagtacaaccgagcaacttttaaaacctttacgtaacataacaaaaatgcatggttgatcactatttttgccattagtcacatatccttgcaatagtgtgtgctggctctcgttttctttgcgcttgttacatagaatgtgcacagaaatttaacctgcctcatatttggagcaaatatggaccgcgtcctgcactttattctcgcgatcgtagtggtggccattctggccctgttggttagccacaaccgtaagcagattcgtattcgttatgtcattcagctgcttgtcattgaagtgctgctggcctggttcttcctgaactctgacattggtctgggttttgtgaagggcttctccgagatgtttgaaaaactcctcggtttcgccaacgaagggacaaacttcgtcttcggcaacatgaacgacaaaggcctggcgttcttcttcctgaaggttttgtgcccgatcgtctttatttctgcgctgattggtattttgcagcatattcgtattctgcctatcgtcattcgcgcgattggtaccgtgctgtccaaaatcaacggcatgggcaagctggaatcctttaacgctgtcagctcgctgattctgggccagtccgaaaacttcatcgcctataaagatattcttggcaagatgtcccgcaaccgcatgtacaccatggcggcgaccgcgatgtctacggtatccatgtctatcgtgggcgcgtacatgaccatgctgcagccgaaatatgtagttgcggcgctggtactgaacatgttcagcacctttatcgtgctgtcgctgattaacccgtatcgcgttgacgaaagcgaagaaaatctgcagatgtcaaacctgcatgaaggacagagcttcttcgagatgctgggtgaatacatcctggcgggctttaaagtggcaattatcgtggccgccatgctgattggttttatcgcgctgatttccgcgctgaacgccctgttcgccaccgtcaccggctggttcggctatagcatctccttccaggggatcctcggctatatcttctatccggttgcgtgggtgatgggcgtaccggcaggtgaagcgctgcaggtaggaagtattatggccaccaagctggtttctaacgaattcgtcgccatgatggatctgcagaaagttgccgccacgctctctccgcgtgcggaaggcatcatctctatcttcctggtctccttcgccaacttctcttctatcggtatcatcgccggcgcgattaaaggcctgaacgaagagcaaggtaacgtggtttcccgcttcggcctgaagctggtgtacggttctacgctggtgagcgtgctctctgcgtctatcgccgcgctggtactgtaattcgtcagcggtatcgcgaaagccgggcaagtcccggctttttcatgcccgcagttcgctcaacggcagcggcttacccaccagatacccctggagataatcgacgcctaactcgagaagcttttcccgctgctccggcgtttcaacgtattccgccaccactttcatcttcttaaccttagccatttcaataatggatttgaccataatggcgtccagcggatcggtctcgatatcacgcacgaagcagccgtcaattttcaggatatcggcccgcaggcttttcagacgctcgtagttagcgtagccggtaccaaagtcatcaatcgctataccgcaaccgaaatctcgcagcagctggatgttatgcatgctggtctcgacatcggaaaacgcctgctcttcggtaacttcaatcgttatcgcctccgccgacaggttatagcgtttaaacagcgcgatgatttgcgccgcgctatccttttgcatcagcgtatagggcagaaggttgacggagaaatgctgaccctgatggtgattgagcgaactaaacagcgtttccagcacctgcatatcaaaacgctggctcaggttaaactgcgcaatcagcgggataaaccgatcgggcgtaatgatggtattgccgcagcgcatacgactcagtatctcgtaatacccctctccggaggcgtcccggataggctgggcgtacagcaccagcccacgttcgttaagcgcctgcttaatcttcgccagcagccgtacctgttcgctcgtttgatcggaaatctgctcttgcgccgcgtccagcggtaatacgcgccgcgccgcgccggcctgctccgataaccagctaagctgaccaagcatcgggtgaagctcagattctatgccgcggtagccgccccacgatgcgccaaattccagatctaacgcctggttattccagctaaattttttatggttaagcgtggaaacaatatgacttaaccgcgcctctggctccggccccttcagtaccagcagtagctcgctgccggggagctgaaatattcgctcgccggcagctaatagcggctgtagcttccgggctatctgccgtttgctctccactctcatcatcatgccataatggcggctcaggaagtccagattctgaatgcgcaggctgctgatggccacagcaggattccgctgcaggtgactctccagcgcgcgcagattcggtaaaccggttagcggatcttcttccgcctgatcccgccatctgaacttcattctttcactgcgagcatagatatccgccatataaaacaggcagatagtgaaacaaatgagtaccgaaagaacaaacgacagtgaatattcagtttgtacgccgtgtaaaaaattctggttatacgccacgagtaaaaaggctgaaacggaccatgaaatgcgaatcagcgtatgccccaggcggctaataccaatgaagtataaaatgaaaataagcgggactaaataaccggcaataaaaacagaatcataaggcgtacacagcaccagtaatattgccgccagggccacaaaccaatacaacgtaaatacccgctgctcgcccgcccgccatgagtggcaaagattacgccagaatgctcgtgcataacgtggactgataatcatccgcaacggataataaaagaatgtcgtgaaaattaatgcggcgctaatcaggctttgtatatcgataatggtgtaaataaccgacatactgccgaaatagctggatattgccaacggaaaagcaaaaaaacgccccgccagatacatggtgaccttcaaaaggagcggtgcaaaaaaaccgccccaaaaaatcctcgcgcccatatgttttgccgtcagcccagcgcgccagcgccttccaagctgaaagcgaacaatcgcgcaggacaggaaaactgagaagagctggcaaaatagcaggatcagcgcctgggttagcgtcagatcgattatccaggcattagtgatcgcaaacgcgataatcaatggcgcaacggcgtagcggccaaaaataaaaagtacggaatacattaagctcagcggtagccatgccagataaatttgatttccgtcaataatggtttgtggggaaataaatcgggacagcggaattgcgataaagcagaccaggagcgccagcagagtttttttgatcttaatgttaagatgatcaagcattattgttaattaaaactccggctgcaataaatatattcaggcaacagatattatgttgcttaataaaggcaggcaagattttaaatagtgaaaaaatctgaaattacttaacgcagaggtttgctgacttattcagagaatgctttacatttcctccgccagacaaacaaaaaacccccgccgtagcgagggttccgaatttggtggagctaagcgggatcgaaccgctgacctcttgcatgccatgcaagcgctctcccagctgagctatagccccacaggacctctttacgaaccaaacctgatgggtgcaggtgttggtggagctaagcgggatcgaaccgctgacctcttgcatgccatgcaagcgctctcccagctgagctatagccccgtaacgtaaagcgtgtcgtgttgacgggcggcataatatgaattccttcgccaggtgtcaacggcaaaatcaatcccggctatttgatcgctgaaaaagcaggcaaacggctgacattgcgagccttatcgcagccagaagttaaacatgtcactctttcctttaaaaggatgctataacatgtgcaactaattcccacatatttactcaggaaatagtatgctcaaggaacgaatgacacctgaagaaatagcgcatctgactggcttcagtcggcaaacgattaacaaatgggtacgtaaagagggatggcaaacgtccccgcgccccggcgtacagggcggcaaagcgcgcctcgtacatgttaatgagcaggttcgcgagtttattcgcagcgcgcagcgcgtggccgaaaaccctgtcccctattccgcaacggataacgatctcgaatctctgctgcttaccctgtgtaaagagatgacgccgggagagcaaaagctgctgatgtcgctgctgctgcgtgaagggatcaccgggttactcaaccgactcggtattcgcgatcggtgaaagcatgatgaaacttaaagataaaatgaccccagcggagctcgccgagtgccttaacctcgcccggcaaaccataaaccgctgggccagagaacaaaaatggcggacggaaccgatccccggagtcaaaggcggacgcgctcgtcttatcgtcatcgacaggtcggtgatcgatttcctggcaaatatcccggcgctgcggcatctgaccatggataaccagctggcggaaccgcccgtcaaatactttgtgaacgatgcggacacaatctggcgccagattgtcgagaccatgcacctgatgaccccaactgagcagctgcacctgcgggattttcttgcgcgcgaggggatcagcgggtttctgtcccggcttggcattactgatgcgaagtaacgggcaaaaaaaacggcggggttcgctatccccgccgtttaacaatcgctgtatcaggatcaggattgctggctttcgcgctcagcaataaaggccagcgccttgttgatacgttctacgctacgtgatttaccgatcgcatggacggtcacatcaagcgccggagactgtcccgcaccggtcaccgcgacgcgcagcggcattcccacttttcccatccccacttccagctcatcggccgtcgcctgaatcgcatgatggacgttttccgccgtccagtcgcttatggcggctaatttgtcgcgcaccacttccagcggctgacgagcaacaggacgcagatgttttttcgccgcatcggcatcaaactcggcaaaatcttcatagaaatagcggcagctcgccgccatctctttaagggttttgcagcgctcgcccagcagcttcaccagctcagccagctgcgggccgttacgggtgtcgatattttcctgctcaatgtgccactgtaaatgcgttgccacgtactccggggccagcgagttgatatagtggtggttcagccactgcagcttttccgtattgaacgcgctcgccgatttgctcaccgcccccaggctgaacagtttaatcatctcttcgcgagagaaaatctcctggtcgccgctggaccatcccagacgcaccagatagttcagcagcgcttccggcagatagccgtcgtcgcgatactgcataacgctgaccgcaccgtggcgcttggacagtttcttaccgtcgtcgccgttaatcatcgagacgtgggcgtaaaccggcactggcgcattcagcgctttcaggatgttaatctggcgcggggtattgttgatatggtcttcgccgcgaataacgtgggtgatttccatatcccagtcgtcaaccacgacgcagaagttgtaggttggagaaccatcggtacggcggataatcagatcgtccagctcctggttgctgaattcgatcggaccgcggatctggtcgtcaaaaacaacggaaccctcttccgggttggcaaaacggacgacgcaaggttcgtcatcagcatgatgttcgtggccatggcggcagcgaccgtcgtagcggggcttctcgccttttgccatttgctcttcacgcagcgcttccagacgctctttagagcaatagcatttataggccgtgcccgctgccagcatttcatcaataacggcgttgtagcgatcaaaacgcttggtctggaagtacggaccctcgtcccattccaggctcagccagttcataccatccataatggcttcaatggcctccggcgtggagcgctcaagatcggtatcttcaatacgcagcacaaactcaccgccgtgattacgtgcaaaaagccaggaatagagagcagtacgcgcgccgccaacgtgcagatagcctgtcgggctgggcgcgaagcgagttttgattttcatgaagtggccttacgtttgataaaggtgccgacacgcggcagtgttcgttggattttatggaggaatattctaacaccgtgggctgattcctcaatgttgttaccgtttcaacgtcacgctttcccctttttgtttataaatcatgcgccacggatgacattgcgatcgttttgtttaattttacgacgaacaaacaaattatttagaaaaggcgttgactcattttcaactctccctataatgcgactccacacagcgggggtgattagctcagctgggagagcacctcccttacaaggagggggtcggcggttcgaacccgtcatcacccaccaactactttacgtagtctccgccgtgtagcaagaaattgagaagtgggtgattagctcagctgggagagcacctcccttacaaggagggggtcggcggttcgatcccgtcatcacccaccactttctcgccagctggatttcttgccgaaaaatgaagtaccgaagtgggtgattagctcagctgggagagcacctcccttacaaggagggggtcggcggttcgatcccgtcatcacccaccacttcgggtcgttagctcagttggtagagcagttgacttttaatcaattggtcgcaggttcgaatcctgcacgacccaccaatgtaaaaaagcgccctaaaggcgcttttttgctatctgcgatagacaaagccgacacgggccttcatcttgctatccggcactgaccatcaattcaccagcgccgcaatcagcttctccagcgcgggcgtcgcctgctgttggtcatagacgatatacaaatctgccggtatgcgttcttccagcggacgaaacaccacccccggccacgtcatttgcgcatagctatcagcgatgagcgtaatacctatccccatactgaccatcgccagaaccgtttgcggctccatcacttcacggataatcatcggcgagaatccggcgctctggcacacgcgctgcaaaaacgtccagtcggtatgtattgaaggcatggtgacaaaatattcgttacgcaacgccgcaagcgggatcgccttacgcgcggcaagcggatgctcttccggcatggccaccagaaaagaggattcgtgcaagcgcaggctggtaaatccaggagaaggcgctgtcgccatccgccagacgccagcgtccagctcgcgtcgttccagcatcgccatctgcatggcgggcatgttctcgcggaaaagcacctctacgttagggttctctttcaaaaaacgccgcatcaccggacgcatttttccccacatagccgtacctatcacgcccaactctacccgtcccgcctcaccccgcccaatctgttccacgcgcgccaacgcctgattcgcgctggaaagcagacgacgggactcctccatcaggatttttcctgcgtgggtcaacgctacgctgcgggagtggcgaacaaacagcagcgtgccaagctgctgctccaggtctttaatgtgaatgctgagcggaggttgcgacatgttcagacgggccgccgcacgaccaaaatgcagctcttcggcaacagccagaaaatagcgcaataacttcagatcgatacgatgcgtgcgttccatgggtcatgcgctcctgaggcataaagataatgcgcaaagttaccacactgcatcagaaaaaatgaaacggcggaacatgtgcccgccgcggaagaggattaatgcgtcagcgctttcttcattaacttctcaggttcatgtttatatttgaagaacgcggcaaaaataaccgccagcagcaatgaataggccgcgaacaccagccagatggtctgccactcttttacgccatcaacagagaagtaatccacggccatgccgctgagaaccgaacctacccatgcgccaacaccgttcaccatggtcataaacaacccctgcgcgctggcgcgaatatgcgcccccgcctcttgctctacgaacaccgatcctgaaatattaaaaaagtcgaatgcgcagccgtaaacgatcatcgacatcagcagcagaacaaaaccgaacggagacggatcgccaaaggcaaaaaagccaaagcgcagcgtccacgccagcatactcatcagcatgaccgttttaatgccaaagcgtttcagaaagaatggaatggtgagaataaaggcgacttccgccatctgcgaaaccgaaagcaaaatagagggatagcgtacgacaaagctgtcggcaaacgccgggttgcgggcgaaatcatgcagaaaggggttaccgaagacgttggttatttgcagtaccgccccgagcatcatcgcgaagaaaaagaaaatggccatccgcggatttttaaacaatacgaatgcatccagtcccagcctcgtggccaatgtggcgccaggtttcttctcggtcacagcaattttcggtagcgtaagcgcataaatcgccagtaataacgacgcggcagaggcgatatacagctgcgcgctgctcagctccagccccatcaggctcaccgtccacatggcgacaataaaaccaagagtgccaaatacgcgaacaggaggaaacgcggtcgccggatcctggccggactgtgccagacatgaataggagatgctattagacaacgagatagtcggcatataggccatcgcgttaatcagcattacccagaacatcgtctccggatcggtgacggtcgttgcataaagaagcacgcccgcgcagaccaggtggcagagcatataggcccgttctgcacgtagccatttatcggcaacgatccccataatggcgggcatgataatggccgccagccctttggaactatagacaatgccgacatttgccccggtgaaatgcagtgtgtttatcatgtaagaacccagggtgaccagccagctaccccagataaaatattgcaaaaacgacatgagttttaagcgagaggcgatacccatttttccgttccttgccattaaagtaagaccccgcaagcggggtcaatatttattattttttcaggccagtttgcgtaagaagccgcagatcaggttaataaagttctgccgggagagttcggccgctgccagggtttgcgcgtgagatagtttcacatcgccgaggccctcagccagattggtaatggctgagacggccaccactttcagctcgcaatggcgggcagcgatgacttccggcacgacggacatccccaccacatcgccgccgataatctgcatcatgcgaatctccgccgccgtttcaaaattcggcccgggataagagacaaatacgccttcagtcagcggaaacccctcctcctccgctacgcgctgcagaacggcgcggtaatccgcgtcataggcgttggccagggagaagaagcgttcgccgaagcgctcatcattcaggcccaccattggcgtacccggcatcgtgttaatatgatcgctgagcgccaccagacttcccggccccacttccggacgtaaagaaccggccgcgttagtacaaaacagcagttcacaccccagcagctttagcgtccggatggcatcagtcatcaccgtcatgccccgaccttcatagaagtgcccacgccctttcatgcaggcaacgggtacgccggccagatttccaagcaccagttcgccggcatggccgtgcacggtactcaccggaaagccgggcagcttctcgtaagatatcgccaccgcatcttcaatttgttccgccagcgccccgagacccgaccccaggataaaggccacccgcggcgtaaaatccggcttatatccgcgaataatatcggcgctataccagggattctgtgagaaaagcgtgtcgctcataagctgtccttaaaaactgaaagatcgataaagtgattggctaccatgctgttataacgatgctacgcaatcgattaccaatacagttttcccggacgtttgatattaaaaagctattgatttcatttctgatacaaggggtcgttttcgcgtaaggcggtcagctggccagcctgctgccgcaccacctcccacagcgcctctgcggctgtcgatagcgagcggtttttacgccgcgccagcatcagctggcgttccaccaccggggtgagccgcttcacctgcagatgacttccctgagggagcggcagcgctaacgcaggtaggatgctgatgcctatccccgactcaaccatcgggaatagcgtggccggatgaccgatttcctgcacgatatttgcggtaacggcgaatcccgcgagcgcggcgtcaatcagcggccggctacccgaagcataatcctgcaaaaccagccgctggtcatgcagcgcatgccagctcaccgcatcccttttagcgaaagggtgatcgcaacggcaaagcagcaggaaaggttcagcgagaaccgcctcacactgcaaatcggtcgcggcgccagggtcgataacaatgccaaaatcaacttctccctgacggatgctctccagcacccactgctgggggcgatcgtgcagaacaaaatctatctccggatagcgacggttgctgtaggcgatgcactgcgggatcagatgggcggaaatagtctggctggccgccacccgcacggttcccataagctgctgcccgacgcgcccggcctcacgcaacgtgccgtttaactcatccagcaggcgctcaagccgggccgccagctgctgtccggcttccgtgagcaccacttcgcgcgtcgttcggtcaagcaggcgtacgccggtctgatgttccagctctttcacgctgtggcttaccgctgactgactcaggccaatactctcccctgcccggctaaagcttttgacgcgagcaacggtcacaaaaaccttcaactgacgtagcgaataattcatctctttttttcatgaatagatgcaataaatcgattttatttctcaaactaaagaaagcacaatagcgacatcgattttcaggagcgtttatgaaatttttccgcattcttgatccattcaccctgacattagtcaccgtcgtcctgctggcctccttttttcctgcgcgcggcggatttgtccccttctttgaacatttaaccaccgccgccatcgcgctgcttttctttatgcacggcgccaagctctcccgtgaggcgatcgttgccgggggcagccactggcgtttacatctctgggtcatgtgcagcacgtttatcgtttttcccgtacttggcgtgctattcgcctggtgggcgcccgttaacgtcgatccggcgctctataccgggtttatttatctctgcattcttcccgccaccgtccagtcagccattgcgtttacctctctggcgggcggcaacgtggcggctgcggtatgctcggcttcggcctcaagcctgctggggatcttcatttcgccgctgctggtcggcctgttgatgaacctgcacggtgcgggggggagtctggagcaggttggcaaaatcatgctgcagctgctgctgccgtttgtgctgggacatctctctcgtccgtggattggcaactgggtggcaaaacataaaaagtggatctcgaaaaccgaccagacctccatcctgctggtggtctattcggcgttcagcgaggcggttgttaacggtatctggcacaaagtcggcgtcggttcgctgctgtttatcgttattgtcagcatggtgctgctggcgattatgattgcgattaacgtctttgtggcgcgcaggtgcgggtttaataaagcggatgaaattacgattgtcttttgcgggtcgaaaaagagcctggcgaacggcattccgatggccaacattctcttcccgacctctatcctggggataatggttctgccgctgatgatcttccatcagattcagcttatggtctgtgcggtgctggcgcggcgctataagcgccaggccgaagcgttacaggcgcaggagaaaagccgcgcctccgaagcctaacgcgggcgcttaaggggctcgaccaggctggtcagcccctccgttttaatcaatagcgttaatgccatcagctcgccaagatgcccggcgggaaattgatccttacgggcaaaccacagcaaatactcttccggcacatcgattaagcgccgccctttgtatttaccaaacggcatttccgtgttggcaatctcaataagctgatctttatccacgcgactctccgagcaaacgcagcatttcgtcttcatcgatcaccgcaattcccagctcctgcgctttggcaagcttagagcccgccgcctcaccggcgatgaccaggtcggtcttcttcgacacgctgcccgccaccttcgcccccagcgcaaccagccgggctttcgcatcgtcacgggagagctgactcaggctaccggtcagaaccaccgttttgccggcaaaggggctatcaatctcttccgcattgaccacgaccggcgccggccagcggacgccttctttacgcagctgagcaatcacttctcggttgctctcttcggcaaagaaattacgcacgtgcgtggcaaccacaatcccgacatcgggcactttttgcagatcgtcaattgaagcctgctccagcgcctcaatggtgccaaaatgggccgctaaaccggctgccgtcgcctcaccgacttcgcggatccccagcgcataaaggaaacgggcaaaggtggtctctttggacttctccagggcatccaccacgttctgcgctgatttgggccccatgcgatcgagcccggtgagtttacccggcgtcagttggaagagatcggccggcgtatgcacgtactctttttcgaccagctgatcgatgattttatcgcccataccgtcaacgtccagggcgcgacgggagacaaaatgcttgagcgcttctttacgctgggcgccgcagatcagaccgccggtacagcgcgtcaccacttcgccttccacgcgttcaacgtcggaatgacataccggacaatgggtggggaacacgatctcacgcgtctcctccgggcgttctgagagcacgacgttcacgacctgagggataacatcgccggcgcggcgaatgaccaccttatcgccgatacgcagccccagacgctcaatttcatcagcattatgcagcgtcgcgttgctgaccaggaccccggcgacgtgtaccggctccagacgcgcaaccggcgtgatggcgccagtgcgcccgacctgaaactcaacgtcgcgcacgaaagtcatctgttcctgcgccggaaacttaaacgccaccgcccagcgcggcgcgcgggctacgaagccaagctgttcctgcagcgccagcgaatcgaccttgatgaccacgccgtcgatatcaaaccccagcttcggccgatcctcttcaacctggcgatagtaagtaagcacttcctctggcgtatggcagagctttacacgctcgctgaccggcagcccccaggacttaaactgctgcaagcgcgccgagtggctggcaggcagctcgccgccttccagcacgcccacgccgtagcaaaagaaagtgagtggacgcttcgcggtaattcgcggatcgagctggcgtaaagaccccgccgccgcgttacgcgggttagcaaagactttacctccggttcgccgcgcctcttcattaattttttcaaaccctgcctgcggcaggaacacctctccgcgcacctcaagccgctgcggaatattgtcaccgcgtagcttcaggggaatcgcgcgaatggtacgcacgttggaggtaatatcttcgccggtcgttccatcgccgcgggtcgccgcctgcaccagcaggccgttttcatacaggatactgaccgccaggccatccagcttgagctcgcagcagtaagtcaggttatcggtatttttcaggcgatcctgtacccgcttgttgaacgcgaggaagctctcctcatcaaaaacgttgtccagcgacagcatcgggacttcatggcgaatctggctaaaagaggctaacggtgcggcaccgacgcgctgggtgggcgagtccggggtgatcagctcagggtactgagcttccagctcgcgcagttcgcgcattaaccgatcgtattccgcatcagggatttccggcgtatccatgacgtggtagagatattcatgatggcgaagcgtggttcgcagttcagtcagtttttgttcgttcgattccatatcacaccatcaatgataaaaaacccccgacgggcgggggttcaggataagtagatgaaacgcaagaagatgaatcaggcgttagcctctttcacttcacgaattcggtcttgatattcacgcaatttttgcggcgtcatcatacgacgctggtcatccagcactacgccgccgacttcatcggcaatgtactgcgcggactgcagcatcagcttaaagttttgcagttcatcgccaaaggacggaacctgcataaagatagtgaccccgggcgtcatcatatccgccatgctgtcaggattgaaggtgccaggcttaaccatattggccagactgaagagcacctgaccgctgccgtccgggctgaggtggcgatggaagatattcatatcgccaaatttgaagcctgcctgctggatgctattgatgagtagctcgccgttgagctgcgaaccgtgatgcgcagcgacgttcatcacgatgaccgtctccttacgctctttaggctgcggcgcggcctgctgcggctcaggggcctgaggttccggcgccggctgcggctctggagcggcggcaggttgttgaaccggctgctgcacatgctgaacgggctgctgcgcatgctgaacgggttgctgcacatgcggaacgggctgcggctgtaccggctgctgaggcggcacggcgcgctgcggctgctggaccggggcctgggcgtgaacgggctgatgttgcggcggctgcggtgcacggacaggctcttccgggcgcacaggtggctgttgcgcctgacgctcataaggaggctgatactggtgctgcggctgacgaggtgcttcatgctccccatgaacgccattcggcgcatgactggtccgatgaacccggacttcaccaacgccttcaacatcgtcatcaaagtcgtcgccttccgacgcttcatcgtcgcgagacttcatacgtttcagtgggcgatcgcgaaacatcgaggagcgttctttacggctggtccagaaaccgtgcaccagtaaagcgattatggcgatcgcgccaacaatgattaatatcagacgcaaatcctgcatcattatattctctgttgttctaacaccttgccaccacggcaaacatttactcactaagagtatttgccgattacatcaagtgcaagtgcgtcgggggctttcactacataaagatgaactaaatcgtgctttttgctgttttttcgaacatttcctaactggttattgtctgctaacccgataaaatagcccggcattcagcctggatgtcaaaaaaggagcattacctgactatggtttcatcatccgtaacgaccccgcgtagtggcgtctactatttttcgcagggttggaagctgatcgggctgccggggatccgtcgatacgtattcctccctttactcgtcaacattattctgatgggcggcgcattctggtggctgttcacgcgtctggacagctggatcccttcgttgatgagccatgttcctgaatggctgcaatggcttaactatctgctgtggcccatggtggtcatttctattctgcttgtcttcggctacttcttctcgacaatcgccaactggattgccgcgccctttagcggcctgctggccgagcagcttgaagcgcgcctgacgggcgcgacgccgccggatgtcggggttttcggcatcctgaaagatgttccgcgcatcatgaagcgcgagtggcagaagtttgcctggtacctaccgcgggccatcgtccttttgcttctctactttatccccggtatcggccagaccgtcgcccccgtgctgtggttcctgttcagcgcctggatgctggcgattcagtactgcgattacccttttgataaccataaggtgccgtttaaaacgatgcgtcaggcgctgcgcacgcgcaaagtgaccaatatgcagtttggcgccctgaccagcctgtttaccatgatcccggtgctaaacctggtcatcctgcccgtcgcgatttgcggcgcgacggcaatgtgggtcgattgctaccgtgacaaacacgccatgtggaagtagcgctatcgctttcggagcggcttatgccgctccttattacttctggcttgccattatttctcttctgaatatagatatgctaaatccttacttccgcatattctttaagcgggtatgctgaagccgtactcccaaatttcatacagttaaggacgggccatgagtaagatttttgaagataactccctgactatcggccatacgccgctggtacgactgaaccgcatcggtaacggacgcatcctggcaaaggtagaatctcgtaacccgagctttagcgtaaaatgccgtatcggtgccaatatgatttgggatgccgaaaaacgcggcgtgctgaagcccggcgttgagctggtggaaccgaccagcggtaataccggtatcgcgctggcctacgtggctgcggcgcgcggttataaactgacgctgacgatgccggagaccatgagcatcgaacgccgcaagctgctgaaggccctgggcgctaacctggtgctgaccgaaggcgccaaggggatgaaaggcgccatccagaaagccgaagaaattgtcgccagcaacccggaaaaattcctcctgctccagcagttcagcaacccggccaacccggaaattcatgaaaaaaccaccggcccggaaatctgggaagataccgatggtcaaatcgacatcttcatctccggcgtcggtactggcggtacgctgaccggcgtgagccgctatatcaaaggcaccaaaggtaaaaaagatctgattaccgttgccgttgaacctaccgactccccggttatcgcccaggcgctggcaggcgaagagctgaagccaggcccgcacaaaatccagggtattggcgcaggctttatcccaggcaacctggatttgaagctggtggataaagtagtggctattaccaatgaagaagccatttccaccgcccgtcgcctgatggaagaggaaggcattctggccggcatctcttccggcgctgccgttgccgctgcgctgaagctgcaggaggatgaagcctttaccaacaagaatattgtggttatcctaccctcttcaggtgagcgctatttaagcaccgcattgtttgccgatctcttcaccgagaaagaactgcaacagtaatgccagcttgttaatatcgtgtaaaaaagcaccttttcaggtgcttttttgtggcgcacatcaaacttttacccctcctggcattgattcacttcgttgggtctggtatttaaccagcacatttatttcgatgcgcgaaattattccgatttggatttccataagctgaatcgattttatgatttggttcaagtcttcctttagcggcataatgtttaatgacgtggtagacgttaacggcctgaaggtttccacagcgattttccgctgatggtgccggagccggatacgtgatgccggcgctaacgatacaggctaaagtttggccgttaggctaaactttaggtccacaacactaaacctataagttggggaaatataatgttccagcaagaagttactattaccgctccgaacggtctgcacacccgccctgctgctcagtttgttaaagaagcaaaaggcttcacttctgagatcactgtaacctccaacggcaaaagcgccagcgccaaaagcctgttcaaactgcagactctgggcctgacccagggtaccgttgtcactctctctgccgaaggcgaagacgagcaaaaagcagttgagcatctggtaaaactgatggctgaactcgagtaagttcacgggttctttttaatatcagtcacaagtaaggtagggttatgatttcaggcattttagcatccccgggtatcgctttcggcaaggcacttctgctgaaagaagatgaaattgtcatcgaccggaagaaaatttctgccgataaggttgatcaggaagttgaacgttttctgaatggccgcaccaaggcctccgcccagctggaggtcatcaaaaccaaagctggtgaaaccttcggtgaagaaaaagaagccatcttcgaagggcacatcatgctgctggaagatgaggagcttgagcaggaaatcatagccctgattaaagataagcatatgactgccgatgcggcagccaatgaagttatcgaaggtcaggctactgccctggaagaactggatgacgaatacctgaaagagcgtgccgctgacgtacgcgacatcggtaagcgcctgctgcgcaacatcctcggtctggccatcatcgatctgagcgcgattcaggatgaagttatcctggtagccgctgacctcaccccgtctgaaaccgcacagctgaacctgaacaaggtgctgggtttcatcaccgacgcgggcggccgtacttcccacacctccatcatggcgcgttcccttgaactgccggccatcgtgggcaccggtagcgtgactacccaggtgaaaaacggcgattatctggttctcgacgcggtgaataatcaggttctggttaacccgagcgatcaacaaatcgaagaactgcgcaacctgcaggctcaggtcgctgaagagaaagcggaactggctaagctgaaagacctgccggccattacgctggacggccatcaggttgaagtctgcgccaacatcggtaccgtacgcgacgttgaaggtgccgaacgtaacggcgcggaaggcgttggtttgtatcgtacagaattcctgttcatggaccgcgactcgctgccgactgaagaagaacagttcgcagcatacaaagccgttgccgaagcgtgcggctcgcaggcggttatcgttcgcaccatggacatcggcggcgacaaagagctgccgtacatgaacttcccgaaagaagagaacccgttcctcggctggcgcgcagtgcgcatcgccatggatcgcaaagagattctgcgcgaccaggttcgtgccatcctgcgcgcttccgctttcggtaaactgcgcatcatgttcccgatgatcatctctgttgaagaagtacgtgcactgaagaaagagatcgaaatctacaaacaggaactgcgcgacgaaggtaaggcttttgatgaggcaattgagattggcgtgatggtggaaaccccagccgctgcgacaattgcgcgtcacttagccaaagaagttgatttctttagtatcggtaccaatgatttaacgcagtatactctggcagttgaccgtggtaatgatatgatttcacatctttaccagccaatgtccccgtccgtgctgacgctgattaagcaagttattgatgcttctcatgctgaaggcaaatggactggcatgtgcggtgagcttgcgggcgatgaacgtgctacacttctgttgctgggtatgggtctggacgagttctctatgagcgccatttccatcccgcgcatcaagaagattatccgtaacacgaacttcgaagatgcgaaagtattagcagagcaggctcttgctcaaccgacaacggacgagttaatgacgctggttaacaagttcattgaagaaaaaacaatctgctaattcacgagatgcgcggcccaaattactgcttaggagaagatcatgggtttgttcgataaattgaaatctctggtttctgatgataaaaaagacaccggaactattgagattgttgccccgctctctggcgagatcgtcaacattgaagacgtgccggatgtagtttttgcggaaaaaattgtgggtgatggcattgctatcaaacctactggcaacaaaatggttgcgccggtagatggtaccatcggtaaaatttttgaaaccaaccatgctttttcaatcgaatctgatagcggcattgaactgttcgttcacttcggtattgataccgttgagctgaaaggcgaaggcttcaaacgtatcgccgaagaaggccagcgtgtgaaagtcggcgacccggttatcgaattcgatctgccgctgctggaagagaaagccaagtcaaccctgactccggttgttatctccaacatggacgagatcaaagagctgatcaaactgtccggtagcgtaaccgtgggtgaaacaccggttatccgcatcaagaagtaattcttgccgcagaagaatggcgcctctcgggcgccatttttttatctcgccgctttaaacggccgatagcacttctcccgcgaaagtattttcatcccttccgggccgctttccagaatccgcttctcgctgtcagaaacctgtaaatcacactgatatccgccaacggcgccaaataaagatcccacttcgcagacatcctcaagggcttcgctgccggtggtctcaaaatggccgacgactcttccctgctgacgcaccactaaacgatagctcttcattctccctccctatgcggcggaagaatgagctcatcgcagccctgttcattggtccaggtcataaccgccagcacccgctgcgcggcagcgtgggcggcctcgcccagcggcattccgcataccagaccgctcgccagctcggcgcaaaaaaggtcgcccgttcccttcagatcggtttcaacgcgcggatgttcaaccacctcgaccgactgcgcgctaaccaccagcacgttgatcgtggcgctattttctcccggcgcgctggtgataacgacccatttcagtgaatcagagagcagactacgggcggcaataatcgcctcctgctgattatggcaaggcagaccgcttagcgtctccagctcaaacagattgggcgtgatcccctgcgccagcgggagcaaatgcgtacgataggcttcagggatctcggccttgacgtaaataccgctatccacatcgccaatgacgggatcaacgagaatacacagttcaggatgctgctcgcgaatgcgcagcagccattgcgccagacgcttaatctgcacggcgctgcccatatagccggtcgttaccgcccgcagctcgcgcagggcgtcacgctcctccagcgcctttaaatagccggcaaaccactcttccgggataacgccgccatagtaagtatcatagtgcggcgtattgctgaacagcaccgtcggcaccgcgatgacccgcaggccgtgctgctttatagccggtatcgcaatactgttgcctacgctgccgtagaccacctgcgactgcacggccacaatatcgacctgaagcgcccgacttttatcgttgaagagcaccgattgtatttcatcttgctggcccatcctttctccccccgctggacagcgggtcatactctgattatcattcgtcctatgctaaaattcattttgtcataggtcaataatgatcgttggaaaaactgccagtgagatcttcgatagcatccgccatctggtacaaagcggcgtactcaagcctggcgatgttttaccgccggtccgcgagctggcgggcaagctgtcggttaaccgcaataccgtcgctgccgcctataagcgactggtgacctctggcctggctatcagccaggggcgtaatggtaccgccattaaaacccataataccctgcccgcccttgaaggtggcgatccctcttcgccgctgaaggatatctccagcggcaatcccgaccccgctcgcctggcaaacctcaagcactatctcggcgcaattgcgccagcgcctcgcctgtacggcgatgcggcggttgaaccacggctggccgcgtgggccagccgctgggttaacaacgatgtgaacctggatgccgatattaaccttgccagcggcgctgtcgatgcgcttgagcgcctgctgtgcgccctgctgctgcccggcgatagcgtggccatcgaagacccctgctttctcagcagcatcaatatgctgcgctacgccggttttagcccttcgccggtaccggtcgacggggaaggcatgcagcctggggcccttgaagaggcgctgagcaacggcgcccgggcggtcattattaccccgcgcgcgcacaatccgaccggctgtagcctcagcgaatcccgcgcccgggcaatacgcgaaatactggcccgctatccgcaggttctggtgattgttgacgaccatttcgcgctgctctccgccacgccctggtactcccctatcgccgcggaaagtcagcgttgggcgctggtacgctccctgtcaaaaaccctgggaccagatttgcgtctggccatcgtcgccagcgacgctgacacgtcggcggcgctgcgactgaggcttaattccggtagccaatgggtcagccatctgttgcaggatctggtcatcgcctgccttaacgacaacacctttatggcctctctggcggaaacccggcgccactatcgtcagcagcatgaaaagctgattgccgccctcgccagccgcggaatcacccatctgacgccgggagacggccttaatttttggttcccgctggaagagccgagccagccggtagcgctccgtctggcgcacgccggctggctggttcgcgaaggcgaaacgttcggcattcgcgccccttcgcacgggctgaggctgtcgcttgcgacgctcagcgacaatgaaatgaataagctcgccaatgacttataccagatattacaacaacagtgacgggagttaacgctatgcagatccactttatcgtccatgaagtctttgaagcgccgggagcttacctgcactgggcgcaggcgcgcggctacggtatcagctggtcgcgggtatacgcgggggacaggctaccggaaaacgccaacgcttttgatatgctggttgtgctcggcggtccgcagtcgccgcgcacgacattatctgagtgcccctggtttgatagccacgccgagcagcgtttgattgcgcaggccattgccgcaggacggatcgtggtagggatatgcctgggctcgcagcttatcggtgaagcgctgggcgcgccggtcatgcaaagtccggaaaaagaggtgggtcactatcccatcacgctcaccaccgcgggcctgcaggatgacaaactggcccattttggcccctcgctggtcgtcggccactggcataacgatatgccaggcctgaccccggaggcggaagtgatggcctccagcgaaggctgcccgcggcaaattgtgaaatacagcgaccgggtttatggcttccagtgccacatggagtttgatgctgaggtcattgagctgctgatcgcccattcgcagcaggagcttagcgccgccagaggcaggcgtttcattcgtagtgaacaggagatgcgtgcctgggattatcgcgaaatgaatgagaagctatgggcgtttcttgataagctgacggcaaagtaagcaaaaggcttttattaaagcccgacaatttaaggatcgccagaaatgcccaatcccaacccacagcttaaagccgccatcgaagcctgcgatcgcgctatctcccaggaggattacgcgacactgatggagtattacgctgatgacgccgcgctggtcgtcaagccaggcatggtggtgcggggcaaagaaaatatccgcaacgcgtttatcgccattgccgactatttccagcaccggctggtggtgacgcagggaaaaatggagattatcgaaggcggcggcaatgcgctggtgattatggaaacccggctggatatcccgacggcggaagccgggataacacaggtcacgcggcgcgcaacctatgtctttcgtcagcagggtgaacgctggctctgcaccgtggataactcctacggtacggacctgctcgacgcgcccgaggtttaaattcccgcgccctgggtaaagtgctcttcgccaaatacgccggtagaaaggtagcgatcgccgcgatcgcaaacgatcgccaccactaccgcgccaggattttcacccgccacacgtagcgcgcccgccaccgcgccgccggaactgacgccgcagaaaatcccctccttcaccgccagcatccgcatggtgttttcggcatcctgttgatggatatcgagcaccgcgtccaccagctgcgcgttaaaaatgcccggcatatattcggcaggccagcggcgaattccgggaatactgctcccctcttccggctgcagccccacgatgctcaccgctttatcctgctcgcgcagaaaacgcgatacgccggtaatggtgccggtggtacccatgctggagacaaaatgggtgatccgcccgtcggtctgctgccagatttccggcccggtagtggtgtagtgcgcgtacgggttgtccgggttgttgaactgatcgagcagcttgccttcgccgcgctgcgccatggctaacgctaagtcacgcgcgccttccattccctgctctttggtgaccagaatcagctccgcaccgtaggcgcgcatggcggcacggcgctcctggctcatgttgtccggcatcagcagcttcatctgatagcctttaagcgcggcgatcatcgccagcgcaatgccggtgttgccgctggtcgcttcaatcagcacatcaccgggtttaatctctccgcgcttttcggcctcgacaatcatcgacagggccgccctgtctttcaccgaccccgccggattgttgccttcaagtttgacccagatttcgctgccgttgtccggccccatgcgctgcagtttgaccagaggcgtgttgccgattgtttgttctaatgtattcacggttttgcccaataaaaagcccggtaagcattacgccaccgggcgaaaaacatacgcgataacctatcaggctgactcagccagagcaatatcctcgcgcgtctcaatgcgttccttcccgtgataaatacgggcatgctgcagaccgacaaacaggcgctctccccggtgcggcgggacgtcgtcgcgcatgaccacggtcagcggctcggtataccagcccagcggttgtaccaccaattgcgtgtagtgacctttagggctagcttccagcacctgcaccggcagcggtgaatcgaggctggttcggcggctcacgtcaacttcccacggacgcaggaacagatcgaccggcccctgatgcgcggaggtatagcccagcggccagcggtgcgcgcccacgtggaattgtccgccgcgaatggtgccctgcagacggttcacctcgcccataaattccagcacaaagcgggtcgccggttcgcgccagagctgctccggctcgtcaacctgctcaatgttgccctggctcatcactaccacgcggtcggcaacttccatcgcctcttcctgatcgtgggtgacgaagacgctggtgaacttcagctcttcatgcagctgacgcagccagcgacgcagctctttacgcacctgggcgtccagcgcgccgaagggttcatccagcagcagtatctgcggttcaacggctaacgcacgcgccagcgccacgcgctgcttctgcccgccggagagctgcgccggaaagcgatccgccagatgcgcaagctgtaccatctccagcagtttggtcactttcgctttgatggccgccgcattcgggcgctcgcggcgcggcagcacggtcaggccaaacgcaatattgtcgaatacgttcatatggcggaacagcgcgtaatgctggaatacaaagcccaccttacgatcccgggcatgcagacggctcacgtcggtgccatgaaagcggatgtgcccgctggtctgatgctcaagcccggcgataatacgcagcagcgtggttttaccggagccagacggcccgagcagcgccaccatttgtccggaagggatatccagcgagatatcattcagcacctgggtgcgaccaaaagacttcttaatattggcaatctcaatgctcatgatttccctcctgatgctgacgtttttcctgattttctaaacgccactgcaccacactcttcaaaaacagggtcaaaatagccatcagcgtcagcaacgcggcggcagtaaaggagccgacagtattgtagtcctgctccagcagttcaatctgtagcggcagcgacagggtttcaccgcgaatagagccggagacgacagaaacggcgccaaactcgccaatcgcgcgggcgttggtcagcaccacgccgtaaagcagcgcccagcggatattcggcagcgtgacgcggcggaacatctgccagcctgacgcgcccagcagcaccgccgcttcgtcttcgttgctcccctggcttaacatcaccggcaccagctcgcgcaccacaaacgggcaggtcacaaagaccgtcaccagcaccatgcccggccaggcgaacatgatctgcaggttgtgctcatccagccagccgcccagcggcccgttggagccgtaaaagagcagatacaccaggcccgctaccaccggcgacacggcaaaaggaatatccagcagggtcagcagcagctgacgtcccgggaagttaaagcgcgtcaccagccacgccagcagcgtgccgaacaccaggttcaccggcacggtgatcagcgcaatcagcacggtcagccagatggcgtgcagcatatccgggttcgccaggttttccagcgcgggcatcagccccttgctgaaggcctgaacgaagatatacaccgtcggcacgacgagaataaacgcggaaaccagcacgcccgcaccgatcagaaaccatttaccccagttgatgcggggcgcatcgtatcgtttcaattgcgtaacttccgccatcagtgacctaccacacgtcgaccaaagcgactttgcagagtgttaatcgagtacagcagcagcagcgaggccgcgaggatcaccgaagcaatcgcgctcgccgccgggtaatcaaactcctgcaaacggataaaaatcatcagcgaggtcacttccgttttccacgcaatgttgccggctataaaaatcaccgcgccgaactcaccgaggctgcgggtaaaggacagcgcaacgcccgccatcagcgccggggagagctccggcagcaccaccttgcgaaagctctgccagcgcgtggcgcccagggtttccgccgcctcttcatattccggacccaactcttccagcaccggctgcacggtacgcaccacaaacgggatgctggtaaaggccatggccaccgcgataccgagccaggtataggtgactttaatatcaaatttcgccagccactcgccgtacaacccgttcacggagaagagcgaggcgagggttaagccggcaacggccgtcggcagcgcaaacggcaaatccatcagcgcatcaagcagcgtgcggcccgggaagcggtagcgggttaagatccacgccatcagcaggccgaacacgccgttaaaaatggaggcgacaaacgccgacagcagcgtcactttataggccgccaccacctgcgggttggtcactacgtcccagtactgcgcccagctcatctgggcaagctgcatcaccagcgcgctgagcggcaacaacaggatcaggcagacgaacagcaggctggtcccgaggcttaaggtaaagcccggcagcacgcgtttagtcgatactgcaaacattacttacgccccgccgccagcagtttgtccagctcaccgccgctggcaaaatgggttttcatcacatcaggccaggagccaaatttatcttccacgcggaacagttcggtctgcgggaatttatctttcagtttgttcatcacgtccgggttattcacgcggtagtagtaatcggtaatgatggtctgcgcctgcgggctgtacaggtagttgagataggcttttgccgctttctcggtaccgttggcctggacgtttttatccacccacgccaccgggaactcggccaggatgttggttttcgggataaccacctcaaagccctgcgcttcatactgtttgcggatgttattcacttccgattcgaagctgatcagcacatcgcccaggccgcgctcggcgaaggtcgtggtagccccgcgaccgccggtatcaaacacttcgacgtttttcaggaactgggtcatgaactgctcggttttcgctttatcgccgccgtcagccttgtccgccgcgccccacgccgctaaataagtgtaacgcgcgttgccggaggtttttgggttcgggaaaatcagcttcacgtcggaacgcactaagtcattccagtcgtggatattcttcgggttgcctttacgcaccaggaagcccatggtggagtaaaacggcgagctgttattcggcagacggctttgccagtcggcggggatcagcttgcctttgtcgtgcagaatctggacatcggtcacctgattgtaggtcaccacgtcggccttcagcccttgcagaatcgccagcgcctgttttgatgaccccgcatgagattgtttaatcgtcagcttatcgccgccgttatctttcgcccactgctgttcgaactgcgggttaagggcggcaaacagctcgcgggaaacatcgtaggaactgttcagcaattccgtcgcctgcgcctgcgcgaccagcagcacagaagcagccagcgccagatatcctttttttagtgatttaacggccattgcgcacccttatcaatatgatgattttctgctgatcatcatatttataacggctatgaaaggagtaacggttttatataccgtttggcgatttggaagtcgaaaagagaataagggaatggcaaagcttatctgaatcacgcatgcagaaccggaaaacgttcgacgctgccggccgcgccgaacggttccctctcccacggggagagggtttggaggagatcttacagcgccagcagtctatccagcgaaggcgcgaagtagtacccgccggtcaccggtttggtaaaacgcagcatcgcgtcgcgcttaccgtcggtatcgccgaacatgctcagcagctgctgttcaatattgtgcagacgcgcgcagtaggcgcaaaagtagaggccgtgagtcccgctggcgataccgtacggcaggctctgacgcacaatcttcagccctttaccttcttctttcagatccacgcggctcaggtgagaggtatccggacgatcgtcgccgtcaatctcttcgttggcttctttggtacggccgatcatcatctcctgatcgggaacgctcatgcgattaagctgcttgaggttgtgctcccagcgctgcacaaatacgtagctgccgcccgcatcgacgccatcctgaatcaccgccacttcacggcgggtctcttcccccgccgggttttcagtaccgtcgacaaagccgctcagatcgcgctcttcaatccagcgaaagccgtgaatctcttctttaacatcaatcgctgcgccaaaagcggacagggccgcctgagcgacagaaaaattcagctcatgctgcgcggacagaatgtggattagcacatcatactgggtggccggggccagacctttgccataggacgggaagtcttttagctcttcagccccgacgccaccgcttagctgacgccagacgttatggccaaaagcgaccaccgcccccagcttcgcttccgggtatttcgcctgaaaggtggctaacttatcggcaaacaccttgctggcttcgcgcagggcgtcaacatcgcctttgacatttgcttcaatccaaatcgccgcacggcaatgttccggcaaaatgccgctctgaacctgagacatcgctcctcctgaaatagtacaaccacaacgctgtggctttttaaggcgctattgtacccgctttttcaggacctcgaatcacttcagatcaaattagcgacgccagataatcttgctcaccttccagtttttcagcgtgtcgtcggagggcattagctcatcagggccgctccagttgccggtgaaggcatagctaatatgctggctaccctcggccttgcactccaccacggcaccgttatcgttgctgcctttctggcagttaccaaacgctttgctgtagatatcgctgaacggggtaccgattttcacgccgctggcggccttgatattgctatcgcgcacgtcgatgcggctaatagtcccgctctcgccgttgatggtcagcgcgaccttgtcatcttttaacgcttcgaaatagcgcacaatattgccgttagccgttttcatgccgctgcgcaggcggtagctgctgccgagcgcgtcgccgatcgcctgctcgctcagcgccgttgacgccgtcaggttgcctacgccctgttcgctcacctccatagaggaaccaaaccagttccacggataagccgccgaccagttcaccgagctcatcgttgagcagccggttaaagccagcggtagtgcgcagagaagtaaacgtagcgatttcatgactgagtgtcctttctgatgtattcaacgcaagttggagtgcgcgatcggcaaaaagtgccgttaaacctgttcttcgcgaaaacaggctttcagccgacggctgcttaacagccaccagagcgcgtaaagatccgccgccagcaggccgatggtcaccgccgaaggcgactcgccgctcatccacaacagcggttgccagaccaacagcaagagctgggaaagcaccagcagccagcgcatcatgggccagagccgggggaagcgctgacgatgcccgctaatgataaacgccagcaccgccggaatgccggggagcaatcccagccaaaaattatcgtggtccggataaaacagattcagcagcgcgtcgccctgctggcgtgacgcgccggccatcagaaatagcacccacgtccgcgcctgaagcagcagcacgcaccaaaagagaaacggcaaacgcaggcggccgtgggtatcgaaatcggcggggataaactcagtattcttcatcttcaattaagcgcttgccgaggcacagcacgtctgaatgctcatagccaaggcgttcgtacatcccctgcaccacgtcattatcttcgcgaaccataatatttattttcggacagccgcgggcgatcagctttttctccagccgattaagcagcgcattagcaataccgcgaccgcgatattcaggatgcacgccaagataataggcagacccgcgatgcccgtcataaccgcccatcaccgtgccaaccacttcaccgttaacttcggcgaccagaaacaggctggcatcgtggttcagcttacgttcaatatccatttccggatcgttccatgggcgaaggagatcgcaacgctcccacagggtgatgacctcttcgaaatcttgctggcgaaaaacgcgtatctccatggtattccccaccattgacggttaaaaacagagattatggcgtgattgtgcccgatagccaatatcaggcgcaatgagccgcaaaaaatggcatactatgactttgtcatgtattgaaatgaaaagtaaaacaattcttattttgaatggtcgtatcagaaaagacgatacgatataacattggttaccacttgtttgcaattcaggccgaatgagcacttttaaaccattaaaaatacttgcttcgcgccgccaggtgctgaaagccgggctggcagcaatcacgctttcagggatcgcctcacaggccagcgcgaaagaacaacagccattgaaaacatccaatgggcacagcaaacccgcagcgaagaaaaaaggcgccaaacgcgtcgtgatgctcgacccgggccatggcggtattgataccggcgctatcggccataacggttcaaaagagaagcacgtcgtgctggcgatcgctaaaaacgtgcgcagcattctgcgcagcaacggcatcgatgcgcgcctgacgcgcagcggcgatacctttattccgctctatgaccgggtggagatcgcccaccagcacggcgccgatctttttatgtcaattcacgccgatggtttcaccaacccgagcgcggccggcgcttccgttttcgccctttccaaccgcggcgccagtagcgccatggcaaagtatctctcggaccgtgaaaaccgggcggatgaagtggccggcaagaaaacgacggataaagaccacctattgcagcaagtgctgttcgacctggtacaaactgataccatcaaaaacagcctgacgctcggttcccatatcctgaaaaagatcaagccggtgcacaagctgcacagccgcaataccgagcaggcggcgtttgtggtgctgaaatcaccgtcgattccgtcggtgctggtagaaacctcgtttattaccaatccgaacgaagaaaaactgctcggcaccaccgcgttccggcagaaaatcgccacagcgattgccaacggcatcatcagctatttccactggttcgataaccagaaagcccactcgaagagacgttaatgagacccgatgcgcaccaggtaaaagctttccttctccagctccaggatgctatctgccaaaagctcagcaccgttgacggcagcgaattcatcgaagatagctggctgcgggaaggcggcggcggcggacgcagccgggtgctgcgcgatggcggtatctttgagcaggctggcgttaacttttcgcacgtgcacggcgaggcgatgccggcctccgcaaccgcgcaccgccctgagctggcgggccgcagctttgaagcgatgggcgtctcgctggtcgtgcacccgcgcagtccctatatccccaccagccacgccaacgtgcgcttctttatcgcggaaaaaccgggcgccgagccggtatggtggttcggcggcggcttcgatttaaccccctactacggctttgaagaagatgccgttcactggcatcgcaccgctcgcgacctgtgccagcccttcggcgaagaggtttatccgcgctataaaaagtggtgcgacgactacttcttcctcaagcatcgtaacgagcagcgcggcatcggcggcctgttttttgatgatttgaataccccgaactttgaccattgtttcgactttatgcaggcggtgggcaatggcttcaccgatgcgtatctgcccattgtcgagcggcgtaaagagagggtctggggcgagcgcgaacgcgcttttcagctctaccgccgcgggcgctacgtggagttcaacctggtgtgggatcgcggtaccctgttcggcctgcaaaccggcggccgcaccgaatccattctgatgtcgatgccgccgctggtgcgctgggaatacgactaccagccggaagcgggcagcccggaagcggcgctgagcgagtttattcaggtgcgcgattgggtttaacgttgcctgatagtgtggttcgcaggccagatacggcgctgttttgcctgatggcgctacgcttttcaggcctgcgatgacggcgcgaatcgccatccgctaaatagatcgtcatcacgcccactgccgcatccgctgatgcagcgtcagcgacggtttctcggcgaacagctgctgataatcggtagcgaactggcccaggtgccagaatccccactgcatcgccgcatccttaaccgtcgtgctctgcgaccacgggctaatcagctcccggcgcaccgcgtttaaacgaatgcgcttcagccaggcgttcggcccgatccccagaatggcgtgaaaggcgttttgcagcgtacggcggctgacgtgcagctgctgacataaatcgagaaccgtcagcggctccgacatattctccagcacgtactcccgcgcccgggaaagcagacgccgatagctctggtggctaatgctctcggcggtaatcatcggctgcgcctcctccagcatcgcccccatcgccagcaggagattatcgcccaacaccttacgcaccgcgggctgatgaaggttctccggattctcgctaaacgtcgccagcgcctgctgcacaaagccccacagcgccgccttgtgctcctctttgacctccagcgccgactggttacgcagcatatgcagcacccgctccgggtgatgcaggaagctggcctggcgggaaatgacatcctccgagatcactacgcccagaatggtgtaatcatccggcgtgctgagctcaaactcggtgccgccgggtcgggtggcgatttcggcgctgccgaggcactgtgagccaataaacccctgctcgccgcgggttgccggaataccgaaccagaaggagttcggccacaccaggcaggactgacgcagcgccaggccggtatattcgcgaaagacctgaatatcatcgagcaggatttcggtaaattcaccgtgaaatttccccggatgcagctgatcgtaaatctgctgccaggcggtaatcgtcagggcatgttcatagacatcggtggtccgccgctgatggacgttgtccacctcgaccatcggcgtcagtttaacgtcttcgggtaatgcttcatgataaagatggtgcaggttggccggtttttctttttcatgatctgataaaccgggagcgctttcgcgttcccggcacctccgactggttaattttttaagcgatagcgactactgcgtttacgcaacgctccggtagaaaagagctgctccagcgccttcctggcctcttcaagcgaccagccgaaatgggcggccacctcccctgccgtcattccctgacgcgtcgaagagagcagcgtcagcaagggttctgaggattccacgaccaccggcggctccggcgtttgcggcagccgttgaaaaccggcgatcagccgctgggtatcctcttccgggcgtccaatctcccgacggctgataacgcgccccgtacgctgcgccgcagcgctgccggcatccagcgccgcccggcacgccgccaggtcgccttccaccaccagcgtcagcctgccggggtcaagaacctcatggctgagcagccgcacgttggccgccttcagcatcgcatccgccgcgtcaacggcggccaccatgccgtccacttccagtaatcccagggcgttgatcatcgcttcccccttacgcgcgctggattggatgacgggcaatatccagaacggcatcggtaaaggcgttacaggcggctttacaggcggcctggcttcccgtcaaaaaggcggcggaatagttggtttccgacggcggcggcacgtaggtcaccagctgcacgtcggccgatttcattgccgcatcgataccgaaggtcgcctccagcggcggcgccaccagataagcgatcggatcgcccagcgcaatgccggaggtagacgagagataagagccggtacgcgacaccacgtgcgccagaaacgccgtatcttcggcatcgttggcccactggaacgcggccccagtttcgatatgcgccaccatcgcatccagaccggcgcgcacttccgccgggttcgggccgcccagcataatcagcacttcacctgcggttggcgaagggccgtgggccgcgccggcgtaaagagaacgaccgtagaccacttccaccatcgcctgttttgtcgcttcgtcagcggcaatataagtcacatcatccgaatccgccgtgatgagtccgaggctacgtatatgtggcggtaatttaagctcgcgggcaaagccgtcattcactgaggcaatcacgcgcatggccgtcaccgaagggcgaattaaatctaatgcaggcatgatgcctccttaccgagtcatgttgatgccggaagccttctgctccagcatgcgtttggccaaatcgacaatcaccgccgcggcttctaccgggggcgtaccgccctggtgaatattggaaatacaggtcctgtccgcttcgacggtggtcgccacgcgcggcgaatacacggcgtaacaggagaggctttccgactgccccagccccggacgttcgcctaccagcaggatgaccaccttcgcgccgagaatttcgccaatctgatcttcaattttgacccgcccgtagcggacgaagaacggcgtaccgaccttcagtccggcctgcttcaggcccgacagcagcggcggcaggatctcttcatagttgacggtaatcgcgtcggtagagaggccatcggataccaccacctgaacgtcaggattcgccacgcactgcgccttcagcgcctcaatagcctccggactcagccgacggcccatatccgggcgcgtcaggtagaggtttttgtcgctaatttcggagcgcaactccagcaatccctgggttttcacccactcctccggtacctctttcagcaccgtatccttggagcgcgagtggtcggcgaggaagcgcagcagcgcgagggtgcgcggacgcggaccggcgcggccggtacacacgcgcgccgcggtgctgcgcttcagttcggccagcacttccgcacgatgcggctgctgcacgccaatccagcctttcgcctctggcgaacctaaatccagcacgcagctctccgccgcgacctcgcaccggctggcgcacttcgtcaccgtcgcctcaggcgctgctgctgccgtctgcggttgtcccattgacgccatcacgctacgtacaatttcttcaatctgcttttgatccatcatgtgtcatccccgcgtcatcaaaagaacagtgacggatcgcccgcccgttgggtcagacgaccgtttgccataatgcccatggtttccagccagcgttcgaactccggcgacggccgtagattcagcagctgacggacggtagcggtatcgtgaaacgcggtggtctgatagttgagcatgatgtcgtcgccgagcggcatgcccatgatgtagttgcagccggcggtggcgagcagaatcatcaggttttcattgaggttctggtcggcgtcggcatgattggtgtagcagcagtcgcagcccatcgagatgccgctcagcttgcccataaagtgatcttcgagaccggcgcgaataatctgccgatcgttatagaggtactccggcccgataaagcccaccacggtattgacgaggaacggatcgtagtgccgcgccaggccatagttgcgcgcctccatcgtcacctggtcggcgccgaagttcgcgccggccgacagcgccgagccctgcccggtttcaaagtacaggcagttctccccggcgatacggttaaactcggcgccgaccgcccgcgcttcatcgagcatcgccagctccacgccgaactcttttagccccttttcgctgccgcagatgctctggaaaataagcccccccggggcgccgcgacggatcgcttcaatctgggtggtgacgtgcgccagcacgcagccctgggtcgggatattaaacttgtcgataacgccgtagacggtatcgaggacgcgggtcaggttctccacgtcatcggttaccgggttaacgccgatcaccgcatcgcccgcgccgaacgagagcccttcgtagatttgcgcggcaatgctctgcacgtcatcgcgggtatcgttcggctgcaggcggcagctaaaggtgcccggcaggccgatggtggtgttggcttttttaatcaccggcattttcttcgcgccgtagatcaggtcggcgttggagcagaccttcgccaccgccgccaccacttctgaggtcagccctttgcgcacaaacgcgatgtcatcgctggtgacctcatcgttaagcacgtattcgcgcaggtcgctgatagtccagtttttaatccgctgataggcggtttcgttgacgtcatcctgaatcaggcgcgtcacgcagtcctcttcataaggaatcaccggattgttacgaatatcggcgaccgtcatatcggagagcacctgcttcgccgccacgcgctgctgcgaactttccgccgccacccccgccagcacatcccccgaacgcagttcgttggctttagccagcacctcttttacatccttaaactgataaacattgccgaacaatgtggtctttagtttcataagtcgttccctcaggaaggaaatgcgagtgatttcaccgtcaccggcacaaccgatccgccaaaaagaggcgtaccaatgtcgatatagtcccccgcccgtacgctcacctcatcgatgaccgccagcgggagttgttgcagctgcgggcgcagcagcatgcccagcgctttgccaaagtcctgctcggccaccaccagcaggggatgcgggttgggaaagcgcgcgacaaaagccagcagcgcgtcaatcaccaccagcagggcggcgtagcgcaccggcaacgaagcaggaagcgccagcacgtaagcatccgatcccggatccagatcgagctgcatcagcgcctgctgccaggcgctcagcagatcggcttcatcaagcgggatcgccaccggcagattgcgcagcgggagctgaaccccctccagccagatggtgctgccggaaagcgagagcgtgtgcgcgccggcgccaatcaccgtggcgcgtacggtttgcgccgggaactgcacgttcatctcccgcagccgcggatgctcatgcagcgccgtggccaacagtggcccaatatcagaaaaacagaacggatccgcgggctggttgcggtagcactcgcccactccgccggaaagggttatcacctcgggtaccgcgcctgcgggcagcaggccggtttgcatcagccgttgcgccagcggagagagcgtgccgtcgataacttcgacgatcagctccgccatccgccgcgctacctgcgctaactgcgaagcactcaacgcgcgcgcatcggcgcctgcgctaaaaacctcatcgacgatcatttgtcccggctgatgggcataaaccacccgcccctggccgtcggtctccagcaggcgcccgccaacgttcaggcaggcggtggcgctgatttttcccgcttcaaacagcgcgtagtttgaagtaccaccgccgatatcaatgttcagcacccggcacatccgctgttcagaaagggtttgcgccccggcgccgtgaccggcaatcaccgattccagatgcggcccggcgctagccaccacaaagtcgccgagcgactgcgagagcgccatcaccgccgggcgggcgttacgggttttcgcgctttcgccggtgataatgatcgccccggagtccaccgattcgggggcaaccccggcggcctggtactgcgccagaatcagcgccttgagttcggcctccttcagaccgccctgcttatcaaccggggtaaagaagaccgggctttgccagctaatttcgcgtttgatgaattcgtagcgcggcacctgcgacaccgccgcacggttaaccagctcaaggcgggagaagatcacctgagtggtggtggtgccaatatcgataccgacgctcagcagctggcgagttttcacgattgcgcctccgcttcggttttcgccgccgccggcgcgctttcatctttcggcaccagcagcatcgctacgccaatggcggtgacgccgccgatcagcttgccgacgatcatcgggaagatcatggcgttcatgttggcggcggcgaagcctaagtgatcccccagcgcgaaagcggcggagacggagaacgcgcagttgatgactttgccgcgggtatccatctgcttcatcatgccgaacatcgggatgttgttggccagcgtcgccaccataccgccggcagccatattgttgattttcagcagattaccgacgcgcatcagcggcttttcaaaccagcgggtcagcaacagcaccatcggataagcgccgagcagcacgcaggagatcgagccaatgacttcaatggcgcgcatcacctcgccgggctggtcgccgggagccataaagatcgggtcgagccccgggatcagatcccagccgagcaggaacttgatgaccgccgccgccaggccgatggtgatcagcgccaccagaaatttggcgaaaatctggaagccgttgatcattttttccggaataaacttcagccccagcgccaccagcaccgcgacgataagcaccgggatcatattcatcaggatcagcgcgaaggtgaactccaccggctgtccgttaatctccacgccggagtacatggccaccaggccgccggcgatgcagccgatcggaatcgtgacgatcccggccagcacgcccagcgccaggtagcggcggtcggagggctcgatgatgccgagcgcgaccggaatggagaacaccagcgtcggccccatcatcgccccgaggatcaggccggaatagagccacgccgccacgtcgccgcccgccagctctttggcgaggaagaagccgcccatatcgcaggccagcagcgttccggcgaacatcgacgggttggcgccgagcatttcatacagcggaattatcaccggcccgagcaggtgcgccagtgccggcgccagcgcggtcatcccgaccatcgccaggcccagcgcgcccatcgccataaacccctcttcgaactggccgccggatccttcgatgcttttgccaaacttgccgagaaagcgcgccgagccgccaaactgcgacaggatcctgtccacggcggcaatcagcataaagaacatcatgatgtacatgatgatttcgttaattcccatagcctttactccctgtcatttatgatttgtagatactgtgaacgccggggcattaaccgcgctccgggggctttcccgggtcgcggcgtgaacgccttacccgggctacggaatagcagacggctgcgatcctgtagcccggctaagcgcagcgcgagccgggacagccacacgcctccgggaaaatggccgcatcagcgcgccgccgcgtacagatcgataatctgctcccgggtggcggtgcgtggattggtgcgcagacaaatgtcctcctgcgccgcctgcgcccatgcgctgaaatgttcgggcttcgccccggcgtcagagagtcgtttgctcaggccgacttcggcgatcagcgcctcaacggcggcaatagcctcgtggtcgtcggtttttttagcggtcagcgcccggccgatctggctgaaacgctcgcggaataccatgcggttaaaccgcattaccgtcggcagcagcatggcgttggcctgcccgtgtggaatatgcagcgccgcgccgggctgatgcgccatcgcatgacacaagccaagacccgcgctggaaaaggccattcccgccatacacgaagccagcagcatgctttcgcgggcggcgaggtcgtggccgtagcccacggccttcggcagcgcctggccgatcatcgctatcgcgccaagcgccaggctatcggtgaagggcgtcgcgttgagcgcgctgtacgcctcaacggcgtgggtcagcgcgtcaatcccggtcatcgccgtcaccggcggcggaacgtcttcggtcagggcggcgtcgagaatcgccacgtccggcatgagcgaggcgtgggccagcacctgcttgcgcccgctgaccgcatcgataatcaccgtcacgttggtggtttccgagccggttccggcggtggtcggcaccgcaatgagcggcagacgcgggcgcagtacgctgctttccgtcatcgcgctgagcgtctgctccgggttggtgaccaacagcgcgaccgctttcgccgcgtcaagcaccgaaccgccgccaaaggccaccacgccgtcgcacttcgattcgcgcagctgcgccaccgccgcgcagacgtcggtaatgcacggctctcccggcggacagggccagacggtcatcgccacccccttcatcgccaggctgcgcgcaagcccggcggtcattcccgcctgatgcaggaaactgtcgaccatcaccagcagatggcttacgcctcgcgcttgcgcttcctggccgcaggcgctcagcgcgccgaggccgcacagcgtcaccggcggcacgctgaaggttttcacccgctgcagattcagggtatcgaatgcctgaaagagcgccgtctgcagttcagcttgcatagattccctccgctttctctctcccgctgctggctatcgccagcggggtcataaacaggctgtgctgcggtaaatgcacccgtaattccgggaagcgcttgcgaaacagcgcgtccacgcccggctgcatacaggagccgcccgccagccataaatcagcaatgccctggccttcgatatggtgagcaacaatctcggccatttttcgtataccggcttcaccaccggccagatctcctgggcgttgctgcgcttgtactgctccgcctcttccagcggcatgcggcggttaccggcaagggtcagggagatatggtgaccgccggtcgcttcatcggcggagtacgtcacctcgccccgtttgacgatagcgatcccggtggtgccgccgccgatatccaccacgcccgcgttgtcgagctgtagcagatccgccaccgcggtcggttcatccagcacgtggctaacttccagcccggcagattcgagtacgttgatcgaaatacgcgggtcggtgcccggcggaaacgaggtcgccgcgtggctgaagcgacagccaagctgctgttcgagcgtatcgagatggcggcgcacgatggtgacggcgccgaagaaatcccagacgatgccgtcacgcacgacgtcagcccagtccagacacaccgccaccggctgcccttcgctgtcgacaaccatcgacaccacgtcgcaggtgcctaaatccacgcccagccacagcggtgattcactggcggcaggcgtctgattacacagggcggccgctttttgcagtctgggggtgagccaacgttgttcgtcgtgtgccatgagtcatcccttatacaattcggaaggcatccaccagcacgcagcgccgcaggcgaacgaaggtgcgcgcgctggtcaccccctccccggttggcgtagtgatggtcatggtggtccagccctctccgcccagcccgagcccggcgatgcacggcccgtttttaacgaaaatgctggtatcaatggcgttcgccatctgattcatgttgtcgatattgcgcgagtgcatcgccgccgtatggtggcagccgccctccagctgcaccgccagcacgatagcgtcatcgacgctggccacccgtacgacagggagcaccggcatcatcagttccgtcacggcaaatggatggctggccggggtttccacgaacagcaggcgcgtctgcggcggcacgttcaggccgatggcggcggcaatcttgctcgcgtctcggcccacccagtcacggctgaccgtacctttgccgcgctcatcgatattcttcagcagcaccggctgaagctgctcggcctgggccgcgctgagcttcaccgcctgctggccttccatcaggcgcatcagctcgtcggcgacgctatcgaccacaatcagcaccttttcgtcggcgcagatgatgttgttatcaaacgaggcgcctttgacgatggaccgcgcggcgcgcgccaggtctgccgtttcgtcgaccactaccggcgggttaccggcgccggcggcaatcagacgtttattggtatgcttgcgcgcggactccaccaccgcttcaccgccggtgaccaccagcaggccaataccggggtacttaaacagccgctgggccgtttcgatgtccgggttcgccacggtgaccagcagattggccggaccgcccgcggcaatcaccgcctggttgagcagcataatcgcccgctgggaaacccttttcgccgccggatgcggggcgaacaccacgctattgcccgcggcaatcaggctgatggcgttattaattaccgtcgccgccgggttggtggagggggtgaccgaggccaccacgccccagggcgcgttttcaatcagcgtcaggccgttatcgccggtgagcacctgcggagagaggcactccacgcccggcgtgccgcgcgcctgggccacgtttttggcaaatttatcttcaacgcgacccatgccggtttcgctgacggcaagctccgctaattctctggcgtgtttttcgcccgcctcacggatggcgtgaatcgccagctggcgcatcgccacgcttttcagcccctgctgggccacctttgccgccgcgacggcgtcatccagggaggcaaagacgcccatctcatgaacggcgtcgtccggctggctgctggccgtcattttcagcagtaccgctttcaccacctgttcaatatcctgttgattcatgatgttcagtcctatttatggaaaatcacctgaccgccggccaccgcttcatcgacgataccgatgacgcacaaatcgacaggagacgcctcgctgcggtgtgcctgtcgcgccgagcttccgctcaccagcagcacccattcaccgggccccgcgccgatgctgtcgatggcgacggcgcactgcccgtcgggcttgcccgcggcatcaatcatctccaccatcagcagcttgtcgtgcgccagcccctgatggcggacggtgcagacaatctgtcccgtgacgactgccagtttcataccgcctccctgaattgcgtggtaagtcgtgggccggataagcgcagcgccatcaggcaatggcgcgcgttaatgccggagggcaacgctggcgcgtcttatccggcccgaccatcagatgttgctgtcgcctttaaaactgatggggaacacctcctccagatcgccgtgcggacgcggaatcacgtgcaccgataccagctcgccgatgcgctgcgccgcagcggcgccggcatcggtagcggctttgcaggccgccacgtcgccgcgcaccatcgcggtcaccagaccgccgccaatctgcttcacgccaaccagcttcacgcgcgcggctttcaccatcgcatcagaggcctcaatcagcgcaaccaggccccgggtttcaatcattcctaatgcttccattgtgttttcctcttacttaagggggtccagaacgggaccgttcattcaacctgcgtgggtaagcggcactcgccgcttacgtcactccggcgcggcacggctgccactaacgccagttcgataatttcctgcacgctacagcctcgggagaggtcgtggagcggtgcggccagcccctgaatcagcggcccgaccgcacgatagccgcccaggcgctgggcgattttgtagccgatgttgccggcttccagcgacggaaaaaccatcacgttggcccgcccctgcagcggactggcgggcgctttttgcgcggcgacctccggcacgaaggcggcgtcaaactgcagttcgccatccaccatcagctgtggagcgcgctgacgtacgatctctgtggcctgctgtacgttggcgacgttgggatgacgggcgctgccgctgctggaaaacgacagcatcgccacccgcggctcctcgccggtaatggcctgccatgtctccgcgctggcgatggcgatatccgccagctgcgccgccgtcggctgcggcaccacgctacagtcggcaaatcccagcgccggtccgacgtactgcggcagcatcagaaagatcgacgacagcgttttgcagccaggctgaaggccaataatgcgtaatccggcgcgcagcacgttcgccgtcgaggagagattgccggcaatacacacgtcggccttcccggcgctgaccatggcggcggcgaacatcagcgggtcgttgagtttttcctccgcgtccggcggcgttttttctccggcgcgggcaagccagctccgggcaaacgcttcgcgcatttgccggttgctgtgcgggtcgacgatctgcataccgtccatcggcaggcggtggctgagggcgaactggcgcagggcaaaggggctggcgatcaaaatcggctttgccagcccctgctgctggaggtagtgcgccgctttgaggacgcggatatccagcgcgtccgcaaacaccacccgggcgggcgaacgcaaagccagttgacgggcgcgttgaataatcattgatcccctcccagacgctgttggatctgactgacggttagcggatgtttcgccacgcttaaaatcatcatcacgtagacggtgctggagaggcggttgagcgcctgcagaatgtccggacgtaagacctcaaaactgcgggtaataaagacctgcgcggcgaccgtttccgtttcgcgtattttgctgcgcagcagattgagcagcgcggcatcgcggccgtggcaggcttccggcaccagatgatcgtggtcgagatagcgcagcggctggtgggaaaggcgatgcagttcatcctcgttcagcccgacgatagactgcgccgccagcggttcacccacggcgtcggcgcgcataatattgcccaggcgcgagcggatatccgccagccagggctgccagggctccgccagttcgatttgcagccataccgccagggcgatggtggcgtcgagggcggcgcgaaagcccagccgcggatcgcttttggcgaccattttctccgccgtcagatgggtcagggtgtccggttttttgtctaccggctggcggcacagttcgcagcaggcctggggatgagtaccgctgctggttaaaccgtgtaccggctgcggctgctgcgcgtcgtcatcgacaaacaggctgccctgctcgtcgagaaacttaatgcgcagacggcggctttccagcagctcccgggccgaaggcgtcagacgggcgtcggcgggcagatgaatttctgctccttcgctgagcgtatggttcgctctgagccaggcttcggtaataaaatctttcatagcgattgccagttcgcaggccaggcgacgtacaggaagcgcacggtcgacggcgtgccgaattcaatgctcgaacctttcgggataaacatcacgtccccggctttggccaccatggtttcaccttcatggcgcacgtggagttcgccctccagcaccatgtcgacctcgtcatagttcagcgtccaggggaagaaggcgttttcccactgcataaacccggcggccatgctgctgccgtcctgctcggtgaccaaatccgttaagccgacgcggtgcggttcggcgccgtcgaagcggccgaatttcacgctgctgccgtcaatgacctttacgccgcctttaccggtgaccgccttaaagctgggctgcatcgcgtccatccccagcgactgcttctccttcatcactttttccatcagctgcgccaccaggctttcggtaaactgcccttccggcagctgcgcgataatggtttcgcgaatgcgctggctttcggttttttcctctgccgccgggactgccggctctggcgcggattcatcgcactcctggatggcgacgcccagcagctccgcgacttcgcgggcttccggggtgatgatgctggcgcgcagcacaaccgatatttcctcttcgcctcgcgcgtgggccgcacgaatatcgttagctgtgataagtttcttcacctgccccttcctccttttggctgagctcactcaggtaattcaccaaatgctctacgctttgcgggtcgtgagcgttgagttcgaaaatcggctcctgaaaccccatcccgtacagcagttgccgcaccgcggcgacgtcggcgtccggcatatccgttttgctgatcgcggcgatatgtcgtttattcgcgccaatatccagtagcccggcgggtaagcgactttcggtatcatttgccgcgtggacataaatcaacgtatcgacatcctgcagcgtggtaattaatgcgtggtaccagcgcggatgactgaaatattcccccggggtgtcaatatcgcctttctcgttaaattccacggcctgcgtttttctcgcgagggaataattcccctgcaacgcattaaatagcgttgtttttcccgcacccaccgtaccgacaaatgcaatacgtttcattgccgcctctaattagcttttggttaactcgcagagggtgtaatttaataatcggccaagcccgctcaccgtctgcagcagcgcctcttctaccgcgccgaccgagccataaatcaccagcgcgccgctaaaccggtcgagaaaaccgatatgcacatcggcggccttcatcgctaaatcaccggcgatcatggcggtttctccaggggttaaggtcataatgccgatagcgccggattcgggaacgccgatctttttcgccagttctgccccaggatgtgcaatcagatgcgccagcgtcacctgcttgccgggtacaaattcctgaatgatgcgttctttatccatggctcaccgctccgctaaaacttgcgcttatcgtgacaagtttccgctggagtaaataacaaaattcggcaagttgatttgaaaggtgagatagatcacttataaacagaaataaaaaagcgcgggagaattcccgcgcctgaaataattaaatgaacattacagcggctgagtttgcgcttcaacaaccgccagcgcgaccatattcacgatacgccgtaccgaagcaattggcgtcaggatatgcaccggctttgcgacgcccatcagcaccggtccgacggtgacgccttcagagctggagacgcgaagtaagttgtaactaatacgcgccgcttccatattcggcatcaccagaatattggccgaacctttcagcgggctgtccggcatccgctcattacgaatgctttccaccagcgcggcatcgccgtgcatttcgccatcgatcatcagctccggcgcctgcgccttcaccagctccagcgcctgacgcattttgctggcggacgggcagtccgaggaaccaaagttcgagtgcgacagcagcgccacccgcggttcaatcccgaatcgacgaacggtttctgccgccatcagggtgatctcggcaatttgctccggcgagggatcgtggttgacgtaggtgtcggcgataaaggtgttgccgctcggcagcagcagcgcgttcatcgccccggccgcatgaaccccttcgcggtagccaaacagcggctgaatgacgctgtagtgctcgtgatagtcaccgatggtgccgcagatcatcgcatcggcttcgccgcgctgcaccatgatcgcgccaatgaccgtagtgttgctgatcaccgcccgctgcgcctgctcctgggtgatcccgcggcgcttcatcagggtgtaatattcattccagtactctttgaagcgcggatcggattcgttattgacgatctcaaaatcaaccccggctttgatctgcagtcccagcttctggatgcgcatctcaatgacgccgggacgaccgatcagaatcggtttcgccagcccaagggagaccagctcctgagtcgcgtgcagtacgcgggtatcttcgccttccgccagtaccacccgcttcggctctttgcgcgcctgcgagaaaatcggcttcataaacaggttcgttttgtagacgaactcgctgagcttctcgatgtacgcatcaaaatcggcgatcgggcgggtcgcgacgccggagtccatcgccgctttcgctactgccggagcaatcttgacgatcagccgcgggtcgaacggcttcggaatgatatattccgcgccgaagctcagatcctgatcgccgtaggcggaggccaccacttcgctctgttcagcgtgcgccagctcggcaatcgcgtgcaccgccgccagcttcatctcttcgttaatcgccgttgcgccgacgtccagcgcgccgcggaagatgaacgggaagcacagcacgttgttcacctggttcggatagtcggagcggccggtacaaataatggcgtcggagcgcacctctttcgccagcggcggcagaatctccggctccgggttagccagcgccagaatcatcggcgcgcgggccattttcttcaccatctcctgagtcagcactttcgggcccgagcagccgaggaaaatgtccgccccgtcaatcacgtcatccagcgtgcgtttgccgctgtcttcaaccgcataggccgctttcgtctccgccatatttggctcgcggcccttatagataacgcctttcgagtcgcagaccacgatgttgtgtttctgcatccccagcgccaccagcaggttcatacaggcaatcgccgccgcgcccgcgccggagaccaccatccgcacgtcggagatgtttttctccaccacccgcagaccgttaagaatcgccgcggtactgataatcgctgtcccgtgctgatcgtcatggaaaaccggaatattcatgcgctcgcgcagcttttgctcgatgtagaagcactccggcgctttgatatcttcaaggttgataccgccgaaggtcggctccagcgccgcgacgacgttgataaatttgtccgggtccagttcatcgacttcaatatcgaacacatcgataccggcgaattttttaaacagaacgcctttgccttccatcaccggcttaccggccagcgcgccgatattgcccagccccagaacggccgtgccgttggagaccaccgccacaaggttgccgcgcgcggtatatttataggctgccagcggatccttctcgatttccagacagggcgcggcgacgcccggcgagtaggccagggccagatcgcgttgggtagccagcggttttgtcggggagacctggatttttccggggaccgggaattcgtggaaatcaagggcgctttgttttaactgctcatccattttatcgttcctttcacgtatcgatcgtagggggtgaaacgttatcgcgtacctggtgttcaccctaaagggccacctagtatctcgcctgacggcttcgtaaactttgaacaccgccaaactctcgccataacaaagttatatttgttatcgatttatattgtttatgtaacttagtttcagaagcaaggatagccccgtctgctatgctttttagttatgcaactcatcaccctctctatcctaatccaataaaaactcatgtaacctattgtttcaggagcacattatgtcccgtagagaactagccaacgccatccgcgccctgagtatggatgcagtccagaaagccaactccggccaccccggcgcgccaatgggtatggccgatatcgccgaggtgctatggaacgatttcctcaagcacaatcctgaaaacccgcaatggtacgatcgcgaccgctttattctctccaacggccacgcgtcgatgctgctctacagcctgctgcatctgacgggctatgacctgcccatcgaagagataaaaaacttccgtcagctgcattcaaaaaccccgggccacccggagattggctatacgccgggagtggaaaccaccaccggtccgctggggcaaggactggcaaatgccgtgggcctggctatcgccgagcgcacgctggcggcccagtttaatcagccagaccatgagatcgtcgatcacttcacctacgtgtttatgggcgatggctgcctgatggaggggatttctcacgaagtgtgctctctggcggggacgttaggactaggcaagctgatcggcttctacgaccacaacggcatttccattgatggcgaaaccaaaggctggtttaccgatgacacggcaaaacgctttgaggcctatcactggcatgtggtgcatgaaattgacggccacgaccccgaagccgtgaagaaagcgattctggaagcccagagcgtgaaggacaaaccctcgctgattatctgccgtacggtgataggctttggttcgccgaataaagccgggaaagaagaggcccacggcgccgcgctgggagaacaggaagtggcgctggcgcgccagcagctgggctggcatcacccggcgtttgagatcccgaaagagatctaccgggcctgggacgcgcgtgaaaagggacaaaaggcgcagaaaagctgggaggagaagtttgccgcctatcagcaggcccatccgcagctggcggcggagtttacgcggcgcatgagcggcggactgcctgagtcgtgggatgaaacgacgcggaagtatattgccgatctgcaggctaacccggcgaaaatcgccacccgcaaggcttcgcaaaatgccctcgatgcctacggcccgcatctgccggaactgctgggcggctccgctgacctcgcgcccagcaacctgaccatctggaaaggatcgacttcgctgaaagaggatccggcgggtaactatatccactacggcgtacgcgagttcgggatgacggccatcgccaacggcatcgcgcatcacggcgggtttgtcccctataccgccaccttcctgatgttcgtcgaatatgcccgcaacgcggcgcgtatggcggcgctgatgaaagcgcggcaaatcatggtctatacccacgactccatcggtctcggcgaagatggtccgacgcaccaggcggtagaacagctggccagcctgcgcctgacgccaaacttcagcacctggcgaccgtgcgatcaggtggaggccgcggtggcgtggaagctggcggtcgaacgtcacagcgggccgacggcgctgatcctctcaaggcaaaatctggcgcaaatggcgcgcacgccggagcaggtacagaatatcgcccgcggcggctacgtgctgaaggacgctggcggcaagccggacctgatcctgatagctaccggttcggaagtcgagatcaccgtgctggcggcggagaagctgctggccaaaggggtgaacgtgcgcgtggtttccctgccatcgaccgacgtgtttgatgcccaggaggaagcctaccgggaatcggtcctgccgtcggacgtcagcgcccgcgtcgcggttgaggccggcatcgccgactactggtataagtatgtggggctaaaaggcaaaatcgtcggcatgaccggctacggtgaatcggcccccgcggataagctcttcccttacttcggctttaccgttgagcatatcgttaccgtaggggacgaggtactgaacgggtaacccatagcgtgggccaggcgtctggcccctgccaattatcgcactgcggctgccgcgcgtagcgtaccaggctaaaccgctggccgtcatagcgccagcgcgtttgcgtcccgcagtcgccgggcgcgcgccctttatccagcgtcaccagttcctggcgtcgatcgtcgtagcgggcgtttaccagttcgacatcgcgcggcccgtcgccggggggctggaaaggcagagtgagccgtaccggatgagcaatatacggccgctggcgcgacaccagccaggccagccaaatggtgttgtaggcgcccgcttcgcagctggtcatcagcagcaccctatcgtcggtcagcgcggcaacccgcacctcgcggcgaaacggatccagcgaacaggcgctgctgttcatgcgctcgttgccataatccatgagatcgttaagttcatcgcggctgaggggggactccgccacgtcgattctcgccaccgagcgcagcgccggggcgggcggaacgctgagcggcggctcttcccccttccctacccacgcggtttcgctccccacgcgcttctgccggctatcgataaacagcagggcggctttcagcccctgtaaagagatggcctgcaggccattttcgagggttatcgcctttgctgcctgcacctgctgcagaaaggcatcaatggtgacgctatcgtcggtttcaagcagtttgtcggcgatctgccaatgtttatcgcccagagacaggggtttaccatcgaggcgaaggcgcggcgcaatcggcgccagcgccgcgaccggattgcccacgccgccgagttcaatgcgcaggctggcgttggtggccgccccggcgctgcgggtgagggtcatgaccaggccgtgatgcagcccgacgttgcgggccacgcagaagttctgattgttgcaggttacctgccagtcattgaagagctgttgtgccggcgccgcccgcaccagcgacgtcggcagtaaaccgaaaagcagaaacaaaataacccgatgcaacatgagcggcacaaccccggagaaaacgccatacacagcggctatgttcaccagcggcgaggttttactcaatcggatttatcagagatccccgttcatcagcccggaggtttgcaaatattgcagcaggatcaccgctttgccatcgcggatctccccgttcgccatcatctccagcgcccgatgataagggagctccagcacctcaatatcttcatcatcaacgccgccgccatcgttggcccgctgagtatcgttatattcggcaataaagaaatagataagctcggtgacgccgccgggcgacataaacagttcaaacagtttgcgcacttcaccgacttcgaaaccggtctcttcaatagcttctttgcgcacgcactcctccggctcatcgctgtccagcagcccggcgcaggtttcaatcagcatcccgtcttcgttgccgtttacccaggtcgcgatgcgaaactggcgaaccagcacgacggtctgcttatggcggttatacagcaagatggtagcgccgttgccgcgatcgtagacttcgcgtctatggcgaaccacgctgccgtcgctgcgcgtcagttcataggtcatgttgcgcaaaaggaaccagttttcggagaggattttatctttgataatgttgatattgagtgacatacgagccccacagcgtgaaatgacgattccatactacgctgtgaagcccgctttgtcgtcagtgaagcggaatcgatttaacctcgaggaagtccattatcccctgcgccgcgtggcggccttccgccatggcggtcaccaccagatcggcgccacgcaccgcatcgccgccggcaaacactttgcgatgggtggtctggtagcggtagcggctttccacattggccttgattcgaccccggctatcgagcttaacgcccaccgattccagccacggcataccgtgcggatggaaaccaaaggccatgatcaccgcgtcggcgggcatgacaaactcgcttccggggattggcgacgggctgcggcgcccctgagcgtccggcgcgcccagccgggtacgcagaaagcgtacgccgttgacgtgtcccttttcgttcagctccagggtgaccggctggacgttaaattcaaactgcgccccctcttcgcgcgcgtttttcacctctttcttcgaaccaggcatattggcttcatcgcgacgataggcgcaggtaacctgcttcgcgccgtggcgcagcgcggtacgcacgcagtccatcgccgtatcgccgccgccgagcaccacgacgttcagcccttcggtgttgacgtaaggctcttccggcagctcaagcagccccatcacctgtttggtgttggctatcaggaacggcagcgcgtcatatacgccgggcgcgtcttcattcggcagatccgctttcatcgagcgataggttccggcgccaataaataccgcgtcatagtcatcaagcagcgtcgtcagcgggatatctttgcctatctcgcagttcagctcaaagcgcacgcccatctgggtaaagatttcccgccgccgggcaagcagagatttatccagcttaaaggccggaataccaaaggtcagcagaccgccaatttccgggtgacggtcaaagaccaccggactcacgccgttacgcaccagacggtcggcgcaggcgagcccggcaggacccgcgccgataatcgccacccgcttgccgctttcaacgacctgagaaagatccggccgccagccgttggccagcgcctggtcggagatatagcgttcaatgttgccgatagtcaccgaaccgtgctcatcgcgcagcgtgcaggccccttcgcacaggcgatcctgcgggcagacgcggccggtaatttccggcaggcagttggtctggtgagaaagctccacggcggcggaaatatccccctttttcacgcgttcaatccattgcggaatgtggttatgcagcggacaggtccattcacaaatgctgtgctcgccgcacgtcaggcagcgctccgcctcgcggttggcctgcccggcgctgaacggcagatagatttcgctaaaattggccttacgcgcctcggcggatagcttgtcgggctcgccgcgcggcggcgtcgcggccatctgcgcgactttgcccgcggagcaaggcgccatcgccgcgccggggtggccaagacgcgccgcgcgctgacgccgctgtttcgccagattcaccagcgtgctgtccgttgccagtaccagcgcttcggccgggcagttttgtacgcaggcgggcccctcttcgcgaccgctgcacaaatcgcatttatgcgccgtcgctttgaccctctcctcctgtaccggcgtcaggacgatttgcatcacgccaaacgggcaggcaaccatacaggatttacagccgatgcatttctcctgattaacctggacgctgtcgttaagctggctgatggcgccattgggacaactgcgggcgcacggcgccccttcacaatggtggcaggttacggcgttacgtttttgctcgtttttgataaccgtaatgcgcggcaaaaaacgctgcggggtcaaaacatgctgctcatcgttgtgcgccatgacgcaggcaacttcacaagccttgcatccgatgcacttatgactatcgcttaaaataaagtggttcatgacatccttcagtcttcgtggtgaataacccctcaattcgcatgcttatctattacccgacaaaacggtgccggaacaatgtgcatttgcacaggttgccgattttttggtaataacccgaggtggatcaatttttttgacttaaatgaaatcacgttttatttagctaagtaataatgcgctacgtatgcgccaccgcggcggcgcgccgaaaggaaggagcaggtagaggaagaaagagagttctttacgctgccataaaaggcacacgataaattacactatctccttattttctccacgattgcctgagggcttgccgctagagtgtcacaggctgtgcaataacaaaaaaatgtgcaaaatgaggtcctaattctgatggcgaatttttttatcgatcgccccatttttgcgtgggtactggcaatacttttatgcctgaccggtacgctcgcaattttgtcgcttcccgttgagcaatatcccgaccttgccccgcctaacgtacggatcacagcgaactatccgggcgcttcggcacagacgctggaaaatacggtcacccaggttatcgagcaaaatatgaccggcctcgataacctgatgtatatgtcatcccagagcagcggcaccggccaggccaccgtgacgctgagctttaccgccgggaccgatccggatgaagcggtccagcaggtgcagaaccagctacagtcggcgatgcgcaaactgccgcaggccgtccagaaccagggcgtaacggtgcgtaaaaccggggataccaatatcctgacgatcgccttcgtctctaccgacggcagtatggataaacaggatatcgccgactacgtcgccagtaatattcaggacccgctcagccgggtcaacggcgtcggagatattgacgcctatggttcgcagtattcgatgcgcatctggctcgatccggccaaactcaacagctttcagatgacggcgaaagacgtcactgatgccatctcttcgcaaaacgcgcagatcgccgtcggccagctgggcggcacgccgtcggtggataaacaggcgctcaacgcgacgattaattcacaatcgctgttacaaacgccggaacagttccgtgatattaccctgcgggttaatcaggacggttcggaagtcacccttggcgacgtcgccaccgtcgagatgggggcggaaaaatacgattacctcagccgctacaaccgccaggcggcgtccgggctgggggttaagctggcctctggcgcaaacgaaatggcgaccgctgaacgcgtcatcagccgtctgaacgagctgtcgcaatatttcccgcacggcctggaatataaagtcgcttacgaaaccacctcattcgttaaggcgtcgattaccgacgtcgtgaaaacgctgcttgaagccatcgcgctggtctttctcgtgatgtatctgttcctgcagaacttccgcgccacgctgatcccgaccatcgccgttccggtggtgctgatgggaacctttgccgtcctttacgcctgcggctacagcatcaacaccttaaccatgttcgcggtggtgctggcgataggcctgctggtggacgatgccatcgtggtggtagagaacgtcgagcgtatcatgagcgaggagggcctctcgccgcgtgaagcgacgcgaaaatcaatggggcagattcagggcgcgctggtcggtatcgccatggtgctatcggcggtatttgtgccgatggccttcttcggcggcaccaccggcgcgatctaccgccagttctcgattaccatcgtctcggcgatggtgctgtcggtgctggtggcgatgatcctcaccccggcgctgtgcgccacattgcttaaacccgttcataaaggcgaaacccacgggcagcggggcttttttggctggtttaaccgcacgtttaaccgcaacgccagccgctacgaaaccgcggtcggtaaaattcttcatcgttcgctgcgctggataatgatctacgtcctgctgctgggcgggatggtctttctgtttctgcatctgcccacgtcattcctgccgctggaagaccgcggcatgtttaccacttcggtgcagttgccgagcggctcaacccagcagcaaaccctgaaggtggtgcagcaggcggaagactacttcctgaacaatgagaagcaaaacgtcgaatcggtattcgcgaccatcggctccggccccggcggcaacggccagaacgtggcgcgtatgttcgtacgcctgaaggactgggacgaacgcgatcccacaaccggttcatctttcgccatcattgaacgcgcaaccaaagcgtttaacaaaattaaagaagcgcgcgtctttgccagcagtccgccggccatcagcggtctgggcagctccgccggttttgatatggagctggaggatcacgcgggcaacggacacgaagcgctgatggccgcccgcgataccctgctggagctggccggcaaaaataaccagctcacccgcgtccgccacaacggcctcgacgatagcccgcagcttcaggtggacatcgatcagcgtaaagcgcaggcgctgggcgtctctatcgacgatatcaacgacaccctgcagaccgcgtgggggtcaagctacgtcaacgactttatggatcgcggccgcgtgaagaaggtctacgttcaggcggccgcgccgtatcgcatgctgccggacgatatcaacctgtggtacgtgcgcaacagcagcggtacgatggtgcccttctccgccttcgcgacctcgcgctgggagaccggctcgccgcgtctggagcgctacaacggctactcggcggtagagatcgtcggtgaagccgcgccgggcgtcagtaccggtagcgccatgacgattatggaagagctggcccagcagctgccgaacggctttggtctcgaatggacggcgatgtcttatcaggagcggctctccggggcgcaggcgccggcgctgtacgccatttcgctgctggtggtgttcctgtgcctggcggcgctgtatgaaagctggtcggtgccgttctcggtgatgctggtggtgccgctgggggttatcggcgcgctgctggccacctggatgcgcggcctggaaaacgatgtctatttccaggtaggcctgctgacggttatcggcctgtcggcgaagaacgccattcttattgtcgaatttgccaatgagctgaatcagaaaggcgaagatctgcttaccgccacgctctccgcctgccgccagcgtctgcggccgatcctgatgacctcactggcgtttatcttcggcgtactgccgatggccaccagcacaggggcgggctccggcagccagcatgccgtcggcaccggggtgatgggcgggatgatttccgctacggtgctggctatcttcttcgtgccgctgttctttgtgctggtacgtcgccgcttcccgctcaaggaacggccgcaataatcgggacgcgccctgacgatattttcgccagggccaaataacagaaaaggcgaccggacaggtcgcctttttcatgtggtcgcttcaactgcattattattctgcctgtgaaatcgccatgcttttattgcggaaaactatttacgaagcatgccttcgataaagtctttccagttccccagttcgtgttcaatcataatagcctctcttattattatgggtgattttatgcaaattcattgatggttaaaagcctgtttgcgctatcgtactgataactttcattaccccctgcggaacgttctctttcattcgtaagtactatgagccgattttgcgcattttaatgtgaccaacagcaacatttagcaacatttgttcatcagcctgaatcaccgggatccgccttgaggccaggaaacaccgtcagggagcgtttaaaaaacagccaaaatgtaacgatgaatatatcccgacgggaaaaaacgatatttattaaagcatttcacgtattatttattcagggcttatatattcggaacattcttagccaatcgtttaattcaacggaaaaggtttaatcatgcttaccatgtacgggataaaaaactgcgacaccataaaaaaggctcgccgctggctggagacgcagcagatagaatatcgctttcatgattatcgtgtcgatggtctggatcgcactttattagatacctttatcgctgaactcggctgggaagccctgcttaacacccgggggacgacgtggcgcaagctggatgaaacggtccgcgccggtatcaataacgccgacgctgcggcaaaactgatgctggaaatgccggcaatcattaaacgcccattgctctgcgcgcccggtcagcctatgctgctgggtttcagtgaatcaagttatcagcagtttaacgaggtgtagtctatgtcttgcccggtcattgagctggctcagcagcttattcgccgcccttccctcagccccgatgatgcgggatgccaggcgttaatgattgaacgcctgcgtgcgattggctttaccgttgaaccgatggatttcggggatacccaaaacttctgggcctggcgcgggcgcggggaaacgctggcgtttgccggccataccgatgtcgtcccgtcgggggacgccgatcgctggattaatcccccctttgaacccaccattcgcgacggcatgctgtttggccgcggcgccgcggatatgaaaggctcgctcgcggcaatggtcgtcgccgccgaacgttttgtcgctcagtatccgaatcataaaggtcgtctggccttcctgatcacttctgatgaagaagccagcgccaaaaacggcaccgttaaggttgttgaagcgctgatggcgcgcaacgagcgcctggattattgcctggtcggcgaaccgtccagcaccgaagtcgtcggcgatgtggtgaaaaacggccgtcgcggctcgctgacctgcaacctgaccattcacggcgtgcaggggcacgtggcctacccgcatctcgccgataacccggtgcaccgcgccgcgccgatgctggcggagctggtgaatatcgaatgggataagggcaacgagttctttccgccgaccagtatgcaaatcgctaacgtgcaggccggcaccggcagcaacaacgtgattcccggcgatatgttcgtccagttcaacttccgctttagcaccgagctgaccgacgaaatgattaaagcgcgcgtcgtggcgctgctggagaagtacgcgctgcgctacagcgtcgactggtggctctcaggccagccgttcctgaccagccgcggtaagctggttgatgcggtggttaacgccattgagcactataatgaaataaaaccgcagctgctgaccaacggcggcacctccgacgggcgctttatcgcgcgtatgggcgcgcaggtggttgaactggggccagtgaacgccaccattcataaaataaacgagtgtgtgaatgccgccgacctccagctgctggcgcggatgtaccaacgcatcatggaacagctggtcgcctgacggcatcaatagagaagaggtaagcgcatggattggctaacgaaatactggtgggttctggtgttggtatttttggtgggcgtgatgatcaacgtgattaaagatctgacccgcgttgaccacaaaaaatttctcaacaataaaccggatctgcccccgcatcgcgacttcaacgacaagtgggacgacgatgacgactggccgaagaacgacccgtcgaagaagaagtaacatcttaccgcggattgccataaagcaatcgcccggcgagttcgacgcgggtcaagtagccctgacagatacgcagcatcgcctccgggaaaatatcccactctgcgctcttttcccgggggcggcgcttaacgcgccttgcccgggctacgggtttccagctcgttgcaagtccggtagcccggacagatgcgcagcatcggctccgggaaattatcccactctgcgctcttttcccgggggcggcgcttaacgcgccttgcccgggctacgggtttacagcccgtctgccggccggtagcctggactgatgcgcagcatcgcctccggggaattaccccactctgcgctctttatcccgggggcggcgcttaacgcgccttgcccgggctacgggtttcctgctcgtctgcaggtccggtactcggacagatgcgcagcatcgcctccgggaaattaccccactctgcgctcttttcccgggagcggcgcttaacgcgccttgcccgggctacgggtttccagctcgtctgcaggtccggtagcccgaacagatgcgcagcatcggctccggaaaattaccccactctgcgctcttttcccgggggcggcgcttaacgcgccttgcccgggctacgggtttacagcccgtctgccggccggtagcccggacagatgcgcagcatcgcctccgggaaattatcccactctgcgctcttttcccgggggcggcgcttaacgcgccttgcccgggctacgggtttacagctcgttgcaggtccggtagcccggactgatgcgcagcatcgcctccgggaaattatcccactctgcgctctttatcccgggggcggcgcttaacgcgccttgcccgggctacgggtttccagcccgtctgcaggtccggtagcccggacaggcgcatcgcgccgcctccgggtttattatcacagcagttcaataatatcgctgtctttcggcgtgctgccgctgagggcttcgtcgaaatagtgcttcggtacggtaaagcgcagatgatcgagggcaaactgcatactgcgatcgtcaatcgcgtgccccagatcttcaacaatatccagcgtcacgtcaccgccggcctgctgcagcgcctcctgccccgccaccgcccacgccagatcgatcacccgatcttcaccgccgtggatcaggtgaacagtggtcgcggtcgtcgcggtctccggcagcgtcgcatagcggccgttaaaggcgatcacccgcgatgccagacccggctcggctttaatgctctccagcgacataatcgccccctgtgagaagccgatcagcgccgtcgcctgcgggctgacgccgctctgctgttgccagtagcgcaccgtttcgataaaggtcggcatgatggcatccactcgctgctggcggttttcttcgctaacgccctgcacggaaaaccactggcgtcccggaggcggaccgcacggctcagcgccgccgatactgacaatcagcgcatcgggaaacagcggcgcaaaccagctaccgatttgccccatggccaccgggttatcgccgacgccatgaaacagcagcagcagttgctgtgcaggtgtcgcggggctttgaacaataaaatgatcgtgtttcatggctgtctccttaatgtctgcaaggaagtttacgccgcaggcgaaatatgaccatgccatttaactgaaggagttagttaaaaaaattgcagcatttgaacctgccggcgcaggtcgttggcgcggttttcatccaggctgagcagcgcctgcgccgcttcttcgcgcagcctggccagcagcgctttccgtccggataaacctaacgtttggcaaagcgcggcctcatcctgctgctgcaggcgggcccgcagcgccggaagcggcagctccaccaatataagcaggcgattgaggctacccgccgaggtcagcagcggacgatgggcaaaagcaaaacccgccacctccagccagtcttcttcagtaagaatagtcgctttcagcgccgtcagcggcacaggttcatctcgccactcgcgcagccagaattcgtcgcgctgcagccgttgggcttcttcgcgtgccaggcgatggcccgcttcgctgagaggatagagcgccatcgcggtgtaacagccgctgctggcttcccgatgcgtgcccagccgcaccagcgtaaaaccgcagcgttgccagaagcgccacagctcaggcgtgtagccaaaactcaccgagagataatcccggtccgcagcctgcgacgccgcccggaccaccagccgctgccccagcccttcgcgctggcgagccggatgcacggcaatacggctgatgcgcagccccgctaacgtagccgccagtgggctaccgccgtgcgccgccagcgactgcgccaccagattgccgcgcggacgacgatagccggcccacaccgcctggctaagcggcggctcaagaccgccctcctccaccagccatagcgatccggcgatgcgctccccgccgcgggcgcaggtaaaatgctgccccggcgcatccatcatgcgccggaggtccagcggcgacgtgcgatagtgggccccggagagcagctgatacatcgcttccggtaacgcaggctgtcgccgccagctctcctggctgacgctttccagcacgatatcgccgcctggcgcgtgctgaaaggtctcgtcgttgaacagcagcagccgcgcaatcgccgcctccagcgggcagccgcttgcccaacggatgggcgtcgtcaggctaaactgccgtaagtgcgcaaaactggcgcaaaacttaagcaaaaagccgcgtcccgtcccctcgtacccctgaacggtagtggtcaacagcgtcctcgggaagcgggagaccagctggcgcagcagcggcccggggatggccgcggcctcatcgacaatcagccatccggcggtgcagccggaagccagcagtgcgtcgggggccataaagcggaaagcctccccggcgaatgtcgccatcacctccgctgctccccgcgccggtgccgtgacgatggcatctccccccagatggcgaataagcattcccgcgagcgcggacttgcctcgcccgcgctcggcggttagcgccgcaataccgggagggaaccgggccagttcggcaagcacggcagcctgctccgcctgcggatgtccgtcggcgggatgccatggcgggcgcacgggtaacgcgggcgccgcaagttcattgccctgccgccagagaatggacgcgttatccgcactaatctgttggcaaaaacgataaacaaaattcggcgtagggatggggtcgggagcgtcgctccagcgcagagaatccgcatcaggacgggccggccattgcgcaaagtcgggggtgagcaataccagccagcttccggcgcgcagcgtaccggctaatgcggcaaaggccgccacatcaaaaccctcgcgggcatcgaaaaaggcgtgctggaattcgcggcccagcagcgatttcagggcagcagacgagacgtacggctcgggcatcggacgcgggccgacccacagcccgtcgcccgccagcgcggtacggactctttgcgcctgacgcagggtccaggcatcgtcgccgctgagaaccagcagacgacgaacgccttcgcgcgccatctgcgccgtcaggtgacgcagttcatccatgacaacagagcattacagcgcgttgccgaaggtgttgcactgcgccgggtcgccgctatcgaaaccgcgtttaaaccaggtatagcgctgctgcgacgttccgtgggtaaagctgtccggcacgacgcgcccctggctctgctgctgcaggcgatcgtcgccaatcgcctctgcggcattcagcgcttcctgcagatcgccggtctccatgtagtcttgcttctgcatgttgtagccccagacgccggcaaagcagtccgcctgtagctccatttttaccgacagacggttcgcttccgcctgcgaagcgttttgctgcagctggcgcactttcgattcaatacccaacagcttttgtacgtgatggccaacctcgtgggcgataacgtagccctgcgcgaaatcgccgccggcgccaagcttgtttctcatctcatcgtagaatgacaggtcgatatacaccgtgctgtccgcagggcagtaaaaaggccccatgaccgattgaccggtgccgcaggcggtccgcgtcgcgccgcggtacatcaccagtttgggctgcggatactgacggcccatatctttaaaaatagcgtcccaggtatcttccgtgtccgccagaatcaccttcgtgaatttcgcggcctcttcatcctgcgggctaatggagcgttgggtggtttgctgttgagataccggctcgccggtcagcatgccggttaaatccacgccgtaatagcccgccaccagaacaataatcagcagtacaatgccgcctttaccgctggggagacgaaaaccgcctcctccgcccatcggtgaaccagattgaccacgacgatcttccacattgtcgctctcgcgacgtccttgccagcgcataagcacctcaattcatcatattaaccaatgaataagatcgtaggcggttcagcggaggattaccacaggaaacagcaagaagagcgccagaagaagaaaacttcttctggcgtcgggggattagtcgagcttcacgcccaggcgatgagcgacttcttcgtaggcttcaatcaggccgccaaggctctggcggaagcggtctttgtccattttatccatggtttttttatcccacagacggctgccgtccggagagaattcatcccccagcaccacttcgcctttgaacagaccgaactccagcttgaagtccaccaggatcaggcccgcatcgtcaaacagctttttcagcacatcgttagctttgtaggtcagctcctgcatacgcgccaggttctctttgctcacccagccaaaggtttcgcagtaggattcgttgaccatcgggtcgtgcatggcgtcgtttttcaggaacaggtcgaacagcggtgggttgagctcgatgccctcttcaatccctaagcgtttcaccagcgaaccggcagcgcggttacgtaccacgcactccaccggcaccatatccagctttttaaccagacactcggtatcggacaacagcgcttccatctgggtcgggatacccgcttccgccagcttgctcataatgaaatggttgaacttgttgttcaccatgcctttacgatcgaactgctcaatgcgagcgccgtcccctgctgacgtatcgttacggaattcgagtatcaacagatccgggttttcggtgctgtataccgtcttcgctttaccacgatacaactcagcttgcttttgcatctttgtcactccagtgatgattaacgataaaaatttgtgcttttctgccgacgcacacgtttgcgtcactatacattaaaaagggccggattgctccagccctgttaattacttacttaatgcagcctggaatacggcaaccagggcatcattttgcgactgcgtcagcgtatggcctttcgggtcgatgaactgcagactgctgcggttatcgaggtccccgacctgcagtttataatcgccggaaaccagctgcgggtcgcgggcgcccagatcggtccagccgctgtcggaaagcggtttgtaggtgacggagaagctgccctgagaacgagagctatcggtgaccttcatgcccactttttccagcgcgcccggcaggcgttgccacaccaggttaaacggcgcgcgaacgatcagcatcggcaggccggtatcatcagcgccgctctgcacgtcgaaggtcgccccggcgtttttctgcgcggcgttctgcgcgctggtggcgttcagatccagaccttcggagatgacgttcagcatggcggtactgtagcgctgcagcgaagccggatcggcaacaggtttacccgcctgctccagattcaccagcttcacgatcaccgcctgctgatagccctgctgcttaactgagatttgatagcgaccacgatactgctggtcttcatcgaggcgattccattcgacccagtcggtattcagcgtctggctggcatcgtcgcgtttcgcgatagtgtagtttttcgactgcacgatgcttgccacctgcgcccacagcgaaccgctgcgcccgttttccaccatcagcgtcgcggtatcaccgttaaactgcgtacgcgcgccgctgaccagcgccagtggctgggccggcggacgaatgtccagggctttgccagtgttaccggtgctggtcgcaaccggaatattataatcacccacctgaatcggcaggatcatccctgctggcgcgtgaagttcactaagcggcgtagcctgcaaataggcctcgtcgccgctcacctgacgcttgtagcgcgagtcagaactacaggccgcgaggagtagaaccagcgaaacacccgcaaccttcgccaggcgcgacttctgtactgagtaagccatcaaatctccctaaactttacagcaaaccggcatgcttcagcgctgcggtcacaaccttaataccgttttcggtaatcggggtcatcggcaggcgtagcgtatcggtcgccacaagacccaacgccttacaggcccatttgaccgggatagggttgggttcgacaaataatttggtatgcaatggcatcagacgctggttaatcgcacgagcttcggcaaattgacctgctagcgccagtcggcacatctcggccatttcgcgcgccgcaacgtttgtcgttacggaaatcacgccatgaccgccaagctgcataaagtccattccggtcgcatcatcgccgctcagcagaataaagtcatctgaaaccagctctttgatctgatgaacgcggcttaagttccccgtcgcttccttaataccgataatatttttaatttccgccagacgaccaacggtttcaggcagcatatcgcaaccggtacgggacggcacattatacaggatttgcggcaggtcagtatgttctgcgatagctttaaagtgttggaacagcccttcctgggtcggacggttgtaatacggcgttaccgtcaggcagccaaccacgccgctatcgttaaatcgcttggtcaggctaatcgcctctgcggttgcatttgcaccggtaccggcaatgaccgggatacgcccgtcggccagctccagcgtctgcatcaccacatcaccatgctcttcatggctcaatgttgcggactctccggtagtccctaccgaaacgatcgccgaggttccgctggcgacatgataatcaatcagttttttcaggcttgaccggcagacgttgccgttttcatccattggcgtgacaagcgctacaatacttcccgtaaacatgggccatcctcagagcataagtgggacaagattctcaatgttacgtttggagtcgtaataaaagcaagagacccgatgccatcagggatgttgtatgccggttttttttatgctttcctaacgttacctcacctttttaaaggaagaacaggtttgacagcctcattacaacactatctggttattaccgcgttgggtgctgaccgcccaggcatcgtgaatacgatcactcgtcacgtcagcagctgcggctgtaatattgaagacagtcggctggccatgcttggcgatgagtttacgtttatcatgctgctttccggctcgtggaatgcaattaacctgattgaatccactctgccgctgaaaggcgccgagctggatctgcttatcgtgatgaagcgtacaaccgcgagaccacctcaggcgatgcagaacaccgtctgggtacaggttgaggtgccggattcgccgcatatcattgagcggtttacggcgctgtgcgatacgtggaaaatgaacattgccgagctggtttcccgcactcagcccggagcgaacgacgagtcagcacagctttttattcaaatcaccgcccacagcccgactacgcaaaatgcatcaaatatcgaacaagcgttcaaagccctatgtacagaactgaatgcacaaggcagtattaacattgttaattattcacagcatgatgaacaggatggagtttgagtgatgaacccactgaaagccggtgatattgcaccgaaatttagcttaccggaccaggacggcgaggaagtaaatttgaccgacttccagggacagcgtgttctggtttatttttatccgaaagccatgaccccgggctgcaccgtacaggcgtgcggtttacgcgataatatggacgacctgaaaaaagcaggcgttgaagtactgggtatcagtacggataaaccagaaaaactctcccgtttcgccgaaaaagagctgctgaacttcactctgctgtctgatgaagatcatcaggtatgcgagcagtttggtatctggggtgaaaaaacctttatggggaaaacctacgacggtatccatcgtattagcttcctcatcgacgccaacggcaaaatcgaacatgtgtttgatgatttcaaaaccagcaatcaccacgacgtggtgctgaactggctgaaagaaaacgcctgacgctaagataaacgcaagacgccgggtcgttctcaaccacccggcgtctttttttagggcattccttgcggcttcgcgctaatgctcgtcttccactatcaggccatccggccaggcgtgcaccaccgctttgatgagcgtcgccagcgggatagcgaagaacacgccccagaatccccacagaccgccaaaaatcaccaccgacagaataatcaccagcggatgcaggttaacggcttccgagaagagtaccggcaccagcaggttgccatccagcgcctgaataatcaggtacaccgcaaacaggctccagaactcggttcccgcgccaaactggaacagcgccacgcccaccaccggaatggtgaccacaaacgcgccgatataggggattaataccgagaaccccaccagcaccgccagcagcagcgaatagttgaggccaaaaaggataaagccaatccacgtcgccacgccgacgacgatcatctccagcaccttaccgcgaatatagttggtaatttgctggttcatctctttccatacctgcccggccaggccgcggttgcgcggcagcacccggcgtacggcgttaagcatctgctctttatctttcagcagaaagaaaaccatcagcggcaccagcaccagatagaccgccagggtcagcagcccgaccagggaggccagcgaatatttcaccaccgagtcgccgacggttaacatccggctgcgcatattctccgccatcgcgtcgataatgccggcatccatgagggccggataacggcgcggcaccgtggcggcgaaatcggaaagtttattcagcatcccgggcatatcgcgaatcagataaatgccctgctgccaggcaaccggcatcaccacaaacgccatcagcagcagaatgccgacgaacagaatcagaacgaccgaggtggcccaggtacgtgaaaacccgatacgctccagtctgacggtgggccactccagcagataggccagaacaatcgacactaacaaaggtgccagcaggccgctgaagaaaaacataatgccgaacccagccagcaaaatgaccagcagcgctatcgcctccgggtcgctgaaccgacgacggtaccactgcattaacatctggagcataaaacccttccctgaagagcggaactgtaacaatctcaggaattgtatcgaaatgtcacaaaaaagacttcgctttttatgggtaaaaccacaaacattactggccggatgaatatcatatttgcaacgccgcgaacgacggctaaactcgctggacctgcttgcggtcagggaacattacgccgcacaatcggtcaaactggcacacctacattacaggacagaggttatgttcaggcagttgaagaaaacgctggtggcgaccgtcatagcgtcgctgacgctgggttcaatattacctgcttttgccgataccgcagacacgctgccggacatgggcacctctgcaggaagcacgctctccatcggccaggaaatgcagatgggagattactacgtgcgccagctgcgcggcagcgcgccgttaatcaacgatccgctgctggtgcagtatattaacggtttaggcatgcgcctggtgtcgcacgccaattccgttcgcaccccgttccacttttatctgattaataacgatcaaataaacgcctttgctttcttcggcggtaacgtcgtactgcactcggccctgttccgctactcggataatgaaagcgagctggcgtcggtaatggcgcacgaaatttctcacgtcacccagcgccatctcgcccgcgcgatggaagaccaaaagcgtaacgctccgctgacctgggtcggcgcgctggggtcgattctgctggcgatggccagcccgcaggccgggatggccgcgctgaccggcaccctggcgggcagccagcaggggctgatcagctttacccgtcaaaatgaagaagaggccgaccgcattggcattcaggtccttcagcgctccgggttcgacccgcaggcaatgccggcgtttatgggtaagctgctcgacgagtcgcgctactccacccggccgccggaaatgctgctgacccaccccttaccggaaagccgtctcgccgacgcccgcaaccgtgcgaaccagatgcgcccggttgtggtgcagtcctccgctgacttctacctggcgaaggccagaacgctgggcatgtacacctccggcgacaataagctgggcaacgacctgctgagcagctgggaaaaaggcaatattcgcgagcagcacgccgcccagtacggccgcgcgctgctggccatgggcaataacaattacgatctggcgcgcaaaacgctgcagccgctgctgagcgccgaaccgcagaacgcctggtaccttgacctggcgaccgatatcgatctcgggcaaaagagagccacagacgcgattaatcgcctgaagggcgcccgcgagctgcgtactaatccggtgctgcagctcaacctcgccaacgccctgctggaaggcgggcagccgggggaagcggcgacgatccttaaccgctataccttcaataataaagatgacgtcaatggttgggatttgctggcgcaagcggaagctaaactgggaaatcgcgatcaggagctggcagcccgagcggaaggcatggcgctggttggccgactcgatcaggccattaccctgctcagcagcgccagctcacaggtaaaattaggcagcctgcagcaggcccgctacgatgcgcgtatcgatcagctgcgtcagctgcaggaacgcttcaaaccgtaccagaaaatgtaaggagacctcatgtccgatacggtcaaaatctatcacaacccgcgctgctccaagagtcgcgacacgctgagcctgctgaaggctaacggcatcgaccccgaagtggtgctctatctggagacgccgccggatgccgccacgctgcgccagctgctgaagatgctggggatggccagcgcgcgcgacttaatgcgccagaaagaagatctctataaatccctcgatctcgcaaacccgcagcttagcgaagatgcgctgatccaggcgatggttgataatccaaagctgattgaacggcctatcgtcgttagccacggcgaggcccgtatcggtcgcccgccggagcaggttctggaaatcgttaactaagttgttgatcctcaggccgcggcccgctaaagcttgaggatctctttcacgaaaggaatggtcagcttgcgctgggcggtaatggaagcgcgatcgagctgatcgagcgtcataaacagcgaacgcatttcgcgatccagccgcttaagcaggaaccgacagacgtcttccggcatttcgaaaccgcgcagtctggcgcgaagctgaagcgcctggagcttgtcttcatccgacagcggctgcagcttgtagatttgcccccagtcaagacgcgaagccagatccggcaggccaagcttgagctggcgcggcggtcggtcgccggtaatcaacagccgggttttaccggactcgagaatgcggttgtagaggtcgaaaatcgccatttcccacagttcatcgcccgctacgcactcaatattatcgatacaaaccagcgacaggtgctccatcccgtccagcacttcaggaacaaaccacgtccgtttatccagaggtacgtagcccaccgcatcgccgcgctgggagagctccgcgcaggccgcgtgcaggagatggctgcgccccgccccttcgcgtgaccagatgtagatgtatccgctatgttcctgccgcagcacgttctgaagggcggcaagaagagaagggttatcgcccggccagaaactcgcgaaagtttcatcatcgggaagatacagtggcaaagagagctgtgccggtgcgttcagatggacctcaacataggcttgcagaaaaacgcggagagtttagcacagaaatacgcaaggagagaaccgggcaggatcgccgcccggtataaggatcaatgttttgcttcttcgctatccgcagcgtcgagaaccacctcttccggacgcagcacgctaatcagtttgaagatcaggctcagcccgacgccaacgatggtcgccagcgccatgcctttcagctcggcggcgccgatatgcacttttgccccgctgacgccgatgatcaggataacggaggtcagaatcaggttctgcgccttgttgtaatcgactttagattcgatcagcacgcgaatacccgaagcgccgataaccccgtacagcagcagtgagacgccgcccattaccggcagcgggataatctggatcgccgccgccagcttgccgacgcaggagagcagaatcgcgatgatcgccgcgccgccgataacccaggtactgtagacgcgggtgatcgccatcacgccaatgttctcgccgtaggtggtgtttggcgtggagccaaagaagccggagatcaccgtagacaggccgttggcaaacattgaacgatgcaggcccggatcgcggatcagatcttttttgacgatattggccgtgactaccagatgtccaacgtgctcggcgatcaccaccagcgcggcggggagaatggtgaaaatcgcaaaccattcaaagcgcggggtgtagaaggtcggcagcgcgaaccagtgggcctcggcgatgggcgtggtatcgacgacgcccatcacgaaggagagcgcgtagccgaccaggacgccgattaaaatcgggataatcgccaggaaaccgcggaacagcaccgaaccgaaaaccgtcaccgccagcgtcaccatcgaaataataatggttttgctgtccggcgattgcccgtcagcgggcagcagaccggccatattcgccgccacgcccgccagctccaggccgataaccgcgacaatcgcgcccatcgccgccggtgggaacatcacgtccagccagccggttccggcttttttgacaataaaggagacgatacaaaacagcacgccgcacatgataaagccgccgagagcgacttcgtagcccagcggcagcagaagcagcaccggggagataaacgcaaagctcgatccaagataagccggaattttgcctttgcagatgaaaagatataacagcgttccgatgccgttaaacagcagtaccgtggccgggttgatatggaacagaacgggcaccagtaccgttgcgccaaacatggcgaacagatgttgcaaactaagcgggattgtctgtaaaagcggcggtctttcactcaccccgatagcacggcgcgtcatggcattttcctctgagagtcgtttgttgattgctgttggtgtgttttattcaaaaaaaagccgactctcaaagtcggctttttctacttcatcatttatttcgtaccaaaaatcttatcgccggcgtcgccgagccccggaataatgtatccgtgctcgttcaggccctggtcgatggacgcggtgtacagctcaacgtccggatgcgctttctccagcgcggcgatgccttccggcgccgccaccagaaccagcaccttaatgctggagcagcccgcttttttcagcaggtcgatggtggcgatcatggagccgccggtcgccagcatcgggtcaaccaccagcgccatgcgttcgtcgatgttggataccagcttctggaagtaaggcaccggctcaagggtctcttcgttacgatagatgcccaccacgctgatacgcgcgctcggcacgtgctcaagcacgccttccatcatccccagacccgcgcgcagaatcggcactacggtaattttcttgcctttgatctgctcaatttctaccgggccgttccagccttcgatggtgactttttcggtcgccagatcggaagtagcttcataagtcagtaagctgccaacttctgaggcgagttcacggaagcgtttggtgctgatgtcgtgctcacgcatcaggcccagcttgtgtttgacgagtgggtgtttcacttccacgatcttcattctctttctcctctgaggggcagccacaaaaaaaatcgccggattataccgcctttttccttttacgccatagccgatatgtttgaccgggatcaaccaaaatgctttacgctgcctgagccagtataagacaaaataaaaaaaccccgcgaaggcggggctgaatggggctttacggccgtttatagcttttcgccgttgctgccgataacctgctgataccaggcaaaagatttcttacggctacgcgccagcgtgccgttgccctcattatctttatccacgtagataaagccgtagcgttttttcatctcaccggttcccgcggaaaccaggtcgatacagccccacggggtatagcccatcaggtcgacgccatcctcaacaaccgcttttttcatttcggcgatatgggcggaaaggtagtcaatacgatactggtcatccaccgagccgtccgcttcgcgcacgtcgatggcgccaaagccgttctccacaataaacagcggcagctggtaatggtcccagaaccagttcagggagtagcgcagcccgaccggatcaatctgccagccccagtctgacttctgcacgtacgggttggaaaccaggctcttgctttcatcgtaatccagctgcggattatcatccgttgctttcgtggcgaacgacatatagtagctaaagccgatatagtcgacgcagccctgagtcagcgccacgcggtcttcttcggtgatgtccagcgcaaaaccgcgacgctcgaagtagttcagcaggtgctgcggatagcggccgcgcacgtgaacgtcggtaaaccagtagcggcgatgcatggcgttcatcgccatcatcatgtcgttgggcgcgcagctcagcgggtaaatcggacacatggcgatcatgcagccaatctgcaatgacgggttaatttcgcgggcggctttaaccgccagcgcgctggcgaccagctcatagtgcgccgcctgaaacatgaccggctcgcggtcctcccccggcagatatttcagtccggagttggtgaacggcgcaaaatcttcgtggaagttggcctggttattgatctcattgaaggtcatccagtacttcactttgtgctggtagcgggtaaataccacccgggcaaagcggacgaagaaatcaatcagtttacggttacgccagccgccgtactccgtcaccagatggtacggcatttcgaagtgggagagcgtaatcaccggctcaataccgtgcttcaggcactcatcgaacaggtcgtcgtaaaactgcagcccggcctcgttaggttcttgctcatcgcccagcggaaagatgcgcgtccaggcaatggaggtgcggaagcatttgaagcccatttcggcaaacaggcgaatgtcgtctttatagcgatgataaaaatcgatcgcttcgtggttggggtagtttttccccggcagcacgccatcggtgatttcgcgcggtacgccgtgcgcgcctgcggtcatcacgtcggcgacgctcacccctttaccgccctctttccagccgccttccagctgatgcgccgccaccgcgccgccccacagaaaaccttctttaaatccggacatgttctctccctatgcgcagtcgccgctctgcgaccggtattgctgattgaaatggtaaaccgcgcctaccagcccggcatcgttgccgtggctgacggtgtcgatatattccgcaatgccaaaccaggccagatgttcgcgcagcagcgccagaaagcccggtcgttccacaatcccgccgccgatcaaaatcgtttgcgggtcgaataagttgacgaggttgtaaagcccggtacccaggccgttaaagaattcagcgaccagacgtcgacaggtggcgtcgcccgcatcgtagcggtcaaaaatctcttcgccagtgacgtcatccagcgccttgccgatatgttcagcgtagcgatggcgcagcacgcgcagcgtgcagttttcgttcatcgaatagcgccgcacatcgcgggtgcccggacgcgcggtttgcatatagccgaactcgccggcgcggaagcgcgcgccgtggaccagctgattattacaaaaaatcgccccgccgatgccggtgccgatggtcaggaccagaaagttgctcatgtcggcggctttaccccgccagcgctcggccagcagcacgcagttagcatcattctcaatggccacgggcagccgcacctgctgctcaagccagcgcttgatggcgaagttatcgaatttacggatggcgccgcccatttcgataaagccggtgtgcgggttaacgtagccgggcgcgctgattgccaccccttcacacgccgggtgagcggcgatccacgccagcatcgcctgcaggatctggtcgccgtcgctgtcgacgatgttctgctttcctttctccagcagcgtgccttcgcgcgtcattacccccatttttaacgccgtgccaccgatatcaaatgcggcaatgttcatcctcagctttcctccagaatccatcacattcgcggtttatctctccagaaatcagaaaagaaaccggtttcactggcatgatgattattcccgacaacgctggcaagcagaagaatgtacccggtttcattttcgtgaacagtatcaaatttgcgcacttaacggccgttttacatcggctgcaaagcaggctcgcaaacgtttgctatccctgttagaattgcgccgttttttattgctaccgcaaacgcgtggagacttcgcagtgaccgataaaacctctctcagctataaagatgccggcgtggatattgatgcaggcaacgctctcgtcgaccgtattaagggcgtggtgaagaaaacccgccgcccggaagtgatgggtggactgggcggattcggcgcgctgtgcgcgctgccgcagaagtatcgcgaaccggttctggtctccggcaccgacggcgtcggcaccaagctgcgtctggcgatggacctcaagcgtcacgacactatcggtatcgacctggtcgctatgtgcgtaaacgacctcgtggttcagggcgcagagccgctgttcttccttgattactacgcgaccggcaaactggatgtcgatactgcgtcgagcgtaatcagcggcattgccgaaggttgtctgcagtcaggctgcgcgctggtgggcggcgagacggcggaaatgccgggcatgtaccacggcgaagattatgacgtggccggtttctgcgttggggtggtagaaaaatcagaaattatcgacggcagcaaagtggccgatggcgacgtgctggtggcgctggcttccagcggcccgcactctaacggctactctctggtgcgcaaaattatcgaagtcagcggcgttgacacgcaaaccaccgatctcaacggtaagccgctggccgaccatctgctggcgccgacccgcatttatgtgaaatccgtactcgacctgatcgccaacgttgacgtgcacgccatcgcccacctgaccggcggcggcttctgggaaaacatcccgcgcgtgctgccggacaacacccaggcggtcattgatgaatcctcctggcagtggccggacgtgttcaactggctgcaaaccgcgggtaacgttagcagccacgaaatgtatcgcacctttaactgcggcgtcggcatggtcatcgcgctgccggcggaagcggcggataaagccattgccttcctgaacgacaaaggtgaaagcgcgtggaaaatagggtatatcaaagcctctgattccgaacagcgtgtggtcattgaatgaaaaacatcgtggtgctgatttccggtaacggtagcaacctgcaggcgattattgacgcctgcgcccggaaaaaaatcaacggcaccctgcgtgcagtcttcagcaacaaggccgacgcgttcggccttgagcgcgcgcgcgcggccaatattccggctcacgcgctcgccgccagccagtttgccaaccgggaagctttcgaccgcgagctgatgcacgagatcgatgcttacgcgccggatctggtggttctcgccggctacatgcgtattcttagcccggcttttgtcgcccactaccaggggcgcatgctgaatatccacccttccctgctgccaaaatatccggggctgcacacccatcgtcaggcgctggaaaatggcgatgaggagcacgggacgtcggtgcattttgtgaccgatgagctggacggaggtccggtggttctgcaggcaaaggtaccggttttcgctgaagataccgaggacgacattaccgcccgcgtacaggcgcaggaacacgatatctatcccctggctatcagctggtttgtcgatggccgcctgcgcgcggaaggaaacgaagcctggcttgatgatgttcctcttccaccgcagggatatgcggcagaagagtaaactttcccgcctctggcgtccgctggaggcgtttttcattagctcaggtttcccgcacggatgaccgctcgcatttttccagacacagcgcttgcgtattccagcctgccggtaggggaactggacgctgccaatcaagttctctgatgactaaatcggaaaccccctgcgcaaacaggacgggtagccctccgggatagggttcgactccccaggcctttcccgtttctgggttgaggcaccaggcgttatcgacacccattcctgttggcgaaagaggattacacggcggacgaatatcataattcccctgccaaccgtggcaatgcagtcgctgggtaagctgaatactctcgagtcgtattcggttgatcatggaaggggtttcactgtgcatattgatggcgccttcacattctccgcaaagcccacgaaactggatttgcgtaatctcaccgggctcgatctgcggattcctgcgacgcgcggagaggaaaatcgggtccgcctccccccagtgacaggctggcgccgccacacactcaaaagtcatgctggtaaagagcattcttcgtagccggccgccatctcgtgaaatcaggccgataccgcgattcgaatcatagatagtgcagttgctgaccacaatatcttcaatatcttgccaggtttccgtgccgattttaaaagcgcagctttttgagcgcagggtacaattgacgatcgtcacctgacgtaaaggacgttggatagccgccggtttatcggtggttttcagacaaattgcatcgtccgccgcactaaaaaaactattagcaacgtgtacctgctgacagctatcgatatccagcgcatcagtatttgccattgtcagatcgttatcgacggtaatgccatcaatcaccacctgtgaacatgaaacaagatgaattgtccacatcggcgcatggtgtatacagatattttccagcctgacccgctggcaattttccagaagaatcatgcgcggccgctgttcggcgggcgtgcgatagcccatatcatcaaccgatgaggagaaccaaccatcggcattaccgtaaatagtaccgcccccacaaatcgagatattttcggcatccagggcatagaggaaagcccggtctgagcactctgcgcggcttaaggccaccgcctgggtgaaatcagcataattatcgctgacgatgagttctgcaccgggtgacaaccacaggcaggtgtttgaccccatgcgtaacccgccaaggtaatattttccactttccaccaccagcgtaccgccgcccgcttgcgataaggtatccagcgctttttgaaaaatctcagtgtcgcgagtaataccatctgcgtgcgggcgccagtttgaaagaaaaatgttcataggatttcctgagatgaaatgggaatgctatctgaacacagtcattatcgatcgccgtagggcaaaacagcatcgacataagtaatctgtcgccgttctcacaacgtccttttttcccgcagttcatctgtgatttcggacacatttcttctcgctccttccgcagaaatagcgatggctatcacatttcattttttcgcccgtcctaatactgccggccatatcacgctatttatttcatttaatccgctttctccgccccgctctcagttcttaacaaaagcgccttaatgacgattccgcaaaattttcacctcttttactgtgctacttcctctttactgacagaagagacaggaaaaatgacgaggacagtaacggcaccacgggaagtaaaaacacgcaatattctctgctgggggatgggcgatatcttcggcagcggggcaatgacgatcaccgggctttggctgctttatttttatattgaagtggcgggcctttctcccgccgccgcagcatccatttttgcgatcgccaaaatttgggatggcatcaccgacccgatcatgggttatatcaccgacaatattcgcacgcgctgggggcgacgccgaatattctttattatcggcgcgccgctctccttttgctttgccctgatgtgggtaagcggttttggctatgcctggtatcttggtacttatttgttattcagcaccgtttttaccctcttgatggtgccctacgatacgctgcctgcggagatgacctcgcgttacgatctgcgttcaaaaatgtctggcgcgcggatgctatttgcccaggcgacagcgtttttatctgcacttatcccaggacaaattttggcgcacgtcgccgataaatcgcaggcatttttatatatcggcctggtcttttccgtactcttcgccctaccgtggatcttcgtttggcggggaacctgggaacgggagaatctcccgccgccttcgactcagcgcgggatggggaaaacaattatttcgctgtatcgagaaatggcttcaactttccgtttacgtacttttcgcattcacatcatgatgtacgttggcggagccgtcgccctggatattttcggctcgctgtttatgcactatcttacatatgtacttcaggtcggcgcatccttagcttcccaggcaatgagcctgatgacgctatttcaattttttgccatccctttctttacctggctttgtattcgcatcggcaacggcaacgcctacaaactggcaattgcactgattatgtgcgctctactgtggttcagccagctttccgcctccattagccatttatcaggattcttattcggcggggccatcgtgatgggcatcgcacgcggcggaacctatcttatcccatggaacgtctacaactttttacctgatgtggatgaagcttataccggcgtcagacgtgaaggcatttacgcgggcgtcatgatgctaacgcgcaaattttcccaggcgctggccctgtttattgttggactggcgctggaggcgtttggctttaccaaaggtgcagagtcgcaagatgccgccgcgctaaacggcatctggtgggtattccttatcggaccgggtttactcactctgctggcgatgtacggcgcgtttcgctttcgtctaagccaggagtgtcataagacgcttaccttcgagctagagcgtctgcggtctggcggtaaacccgaagatgcatcaacgcaggtacgacaaaccgtagagttacttaccgggcatccgcatatgaatacccactggcagcatacagctgaaacgacaacgcaagggaatctctatgtcgcagaaaataagccatcctgaaatcatccgtcttatcgaaaaactgatcgatagcctcaccgcaattcaggatgacaatggtcaattcctgcagcgcctgcctgacgggcgcgtgattgatacaaaaggctgggctggatgggaatggacacatggtatcggcttgtttggtctctaccgctaccatgaacttaccggctcatctcgcgccaggcagattattgacgactggttcagcgcccgtttcgccgaaggaacgccggagaagaatattaataccgcgatcccttttttgacgcttgccagtcgctaccagcaggacgcgcgtcacgaatggcgcgcgtatctggaagtgtggggagatgcgctttatcgtcagattccgcgcactgatgaaggctgcatgcagcatgtcacctacgaaaacgcgcattatcagcaaatctgggatgacaccttgatgatggcggtcctgcctctggccaggattgggcttttattgcaaaaaccttactgggtagaagaagcaaaatttcaatttctacagcacattcactaccttacggatagaaaaagtggtttatggtttcacggctggaatttcgacggcaggcatcattttgccggtgcccgatgggctcgtggcaatagctggataacactggcgattcctgaactactggaaatgctcaatcttgatgagcatgacgccttctatcgccagctctgtaacatcctgcagggccaggtatccgccctcgcccgctgtcaatgtgaaaacgggctatggccgacgctattagatgatgcaacaagctacgctgaagcctcagcaacagggggatttgcagccggtatcctgaaagcgatacgtctcggctacctcgacgacagctatctacccgttgccgaacgagcaatcgcaggcattattgagcatatctcgccggagggagaattaacccaggtttcatttggcacggcaatgggacacgaccttgaccattaccgacgaatccccctaactgcaatgccatatggccaggcgctggcgatactcagcctggtcgaggctttataccgcacgcgttaatacctaatgcctgagtgccgatagttcgctactcaggctatcagccaggctacgaacccgacccgcatcgaacatgatataaaacccaggcgatgcttcgttcatctgctggcaaagcatctccatttcggatgccccctgatacaacgcctgcacgttgatatggcagatttctctcatactccagctattctccacctcacgagcaaaatgcagcgtaaaaaaagctttctgtgcatgcgtgaacagctgacagtagagtgcgagcccccgccattcattctgccagagccgatagagcgccgtgggaaacgcggcattctcggcaaactccagcgcctgcgcgcatagcttcagggcatctgccgctacctcatccttctcttgcgcaattcgcgtgaggttttccatcgatatttgcggatcgtcacgcgtgaagtggatatccttggccgaccccggcagccagtgattacgcgccagctggctgtacaaactccatactgcctgaccgtagctttccggtagctgactatggcggtgaaaaacgtgatcgcgaacataaatcgcctggtaaagcacctccgttgcctgctcaagtagctgctgaaaacggcgggtgactgtaacatcggggcaccagccgtaacgctcagccagccagagatccaacagctgctcctgggtctttcccgcaccatgacctaacagctggctacaggcaaacagattgcattcgcttaacgtttccggtatccagtggttatcaacgctctcccaactggttttgcatatcgcaccggtgattctgggattcgcgctttggcaccacagcagtcggccttttaactcatcaatgcgcaagaaaggcataacgccccagcccacctcttcgcctgctaaatcaatatcaacccagacgtctcgcatagtgacctgaagcagtgcgggattatttggaaatgctggccagaaacgttctggcgttaacttgatcgataccgaaacggttggcggaagcggctcgatagcatcgagaacggtaccaagatcatcattacttgcagggaaaacccgcaaaaccagatgtttattttgtgcggtaaccacctggctgagcgcttgaaaacaacggcgatagagcacaaagctttgcgacggttgccgggtattttcaggctcatccctggcgtttatatcccatttagggcgcgtaatcggcaataaaccatcggtgctggaaagcgcaataattagccctgttaaagctggaattccctgacaaacgccgcgaattttgtctgtcagccagcggctccagaaatccacatcaaaaaggatcccttgctggttatccagtagatacttatgcgacaacagcaattccgttgggaaatccagctcttttgcctgtaaataaaatcgcagcccctgctcgcggcaatacatggcgagacgattaaggtagatacagcgcgctctctgctggctggaaacgctatcgttatagtggaaaggcgtatatcccttcggggacaccagcttaccgaagagatctgcctgccccaccacgatagcattaaagccatgctgagaggcatacctgaccagattgcataccgatgaccagttccatatatcctgattattcagttctaacgctcgcgtctcccacatggttttgctcctgaatctcaccttgccttgaacataacgtaagtcgcgaaaatcgtctgtttttcttcgctatatactgaaagaaaacagtcatacttctttgacataattggacattcagtggcaaagctcgccataatgaaatagcaacatacatctaccggagtgtgagctgtaatgggccaggaaaagctatacatcgaaaaagaactcagctggttatcctttaacgagcgcgtacttcaggaagcggcggacaaaagcaacccgctgatcgagcgcatgcgctttttagggatttactccaataacctcgatgaattttataaagtgcgctttgccgagctgaagcgccgcatcatcatcagcgaagaacaaggcagtaccgcacactctcgccatctgctgggcaaaattcaggcccgcgtgctcaaggccgatcaggagtttgacggcttatacaacgagctgctgctggaaatggcgcgtaaccagattttcctgatcaacgaacgccagctctccgtcaaccagcagtcctggctgcgtaactacttcaagctgtatcttcgtcagcacatcacgccaatcctgattaaccgcgaaacggatctggtgcagttcctgaaggatgattacacctacctggccgtcgagattattcgcggggataccatcaattacgcgctgcttgaaattccgtcagacaaggtgccgcgttttgtgaacctgccgccggaagcgcctcgccgccgcaagccgatgattctgttagataacatcctgcgctactgcctggatgatatcttcaagggcttttttgattacgacgcgctgaacgcctactcgatgaaaatgacccgtgacgccgaatacgatctggtgcacgagatggaatcgagcctgatggagctgatgtcctccagcctgaaacagcgcctgaccgccgagccggtgcgcttcgtttatcagcgcgatatgcccgacgcgatggtcgaaatgctgcgcgataagctctccatctccaactacgattcaatgctgccgggcggtcgttaccacaactttaaagactttatcggcttcccgaacgtcggcaaagccaatctggttaacaaaccgatgccgcgtctgcgtcatctgtggtttgataaattccgcaacggctttgacgcaatccgcgaacgcgacgtgctgctttactacccgtaccatacgtttgaacacgtccttgagctgctgcgccaggcctctttcgacccaagcgtgctggctatcaaaatcaacatctaccgcgtcgcgaaagattcacggattatcgactcgatgattcacgccgcccacaacggtaagaaagtgacggtggtcgtggagctgcaggcgcgtttcgatgaagaagccaatattcattgggctaaacgcctgaccgaagccggcgtgcacgttatcttctccgcgccgggcctcaagatccacgccaagctgttcctggtttcgcgcaaagagggcgatgaagtcgtgcgctatgcgcatatcggcaccggcaacttcaacgaaaaaaccgcgcgtctttacaccgactactcgctgctgaccgccgatgcgcgcatcaccaatgaagtccgccgggtatttaactttatcgaaaacccctaccgcccggtcagcttcgattatctgctggtgtcgccgcaaaactcgcgtcgcctgctttatgagatgatcgatcgtgaaatcgccaacgcgcaaaatggccagccgtcgggcatcatgctgaagctgaacaacctggtcgataaggggctggtagaccgtctctacgccgcttccagctccggcgtgccggttaatttgcttattcgcggtatgtgctcgctgatccccggtctggaaggaatcagcgaaaatattcgcgtgaccagcattgttgaccgtttccttgagcatgaccgcgtttattgctttgaaaacggcggcgataagcaggtttggctatcgtccgcggactggatgacgcgcaatattgactatcgtatcgaagtggccgcgccgctgctggatccgcgcctgaaacagcgggtgctggatattttcgatctcctcttcaacgatacggtgaaagcacgctatcttgataaagaactgagtaatcgctacgtgccgcgcggcaatcgccgcaaagtgcgcgcacagatggcgatatacgactacctcaaatcacttgaacagcccgattaacctatgccaataaacgaaaatgcccctcggccgcaggagttcgctgcggtcgacctcggttcgaacagttttcatatggtgatcgcccgtgtcgttgacggggcaatgcagatcatcggtcgcctgaagcagcgcgtacatctggccgacggcctggatgaaaactctgtactgagcgaagaggctattgcgcgcgggctgaactgcctgtcgctgttcgccgagcgcctgcagggttttgacccatcaagcgtctgtatcgtcggcacgcacacgctgcgccaggcgacaaacgccgcagagttcctcaagcgcgcggagcaggtcatcccctacccgatcgaaatcattcccggcaacgaagaagcgcgtctgatttttatgggcgtggagcacacgcagccggagcgaggccgtaagctggtcatcgatatcggcggcggctctaccgagctggttatcggcgaggatttcgagcctcgtctggtggaaagccgccgtatgggctgcgtgagcttctctcaggcctactttgctggcggcgtcatcaacaaagagaatttccagcgcgcgcgtctttccgccgtgcagaagctggaaactctggcctggcagttccgcatccaggggtggaacgtcgccctgggcgcatcgggcaccattaaagccgctcacgaagtgctggtggccatgggcgagaaagacgggttcatcactcccgagcgcctcgagatgctggtcgaagagctgctgaagtataaaaacttcgactcgctaagcctgcccgggctgtctgaagatcggaaagccgtttttgcgcccggtctggctatcctgtgcggggtgtttgacgcgctggcgattaaagagctgcgcttgtccgacggcgcgctgcgcgaaggcgtactgtacgagatggaaggacgtttccgtcaccaggatatccgtagccgcaccgcgcagagcctggcgaaccagtacaatatcgaccgcgagcaggcgcgtcgggtgctggagaccaccacgcatatttatgagcaatggcaggagcagaatcccaagctcgcgaacccccatctggcggcgctgctgaaatgggcgaccatgctgcatgaagtcggcttgaatattaaccacagcggcatgcaccgtcattcggcttatatcctgcaaaacagcgatctgccgggctttaatcaggaacagcagatgctgatggccaccttagttcgctatcaccgtaaagcgattaagctggatgatttaccgcgtttcacgctgtttaagaagaagcagtttctgccgttaattcagctgctgcgccttggcgtgctgctgaataaccagcgtcaggcaacgacaacgccgccgagccttacgctgaaaaccgaggcaaaccactggacgctgaccttcccgcacgactggtttagccagaatgcgctggtgctgctcgatctggaaaaagagcaggaatactgggaaggggtacctgactggtggctgaaaatcagcgaagaagagaagcctgacgcggcaagctagtttcgcgcatatgggccggacgtccggcccattcgcttatcaatcctcaaccagcgcctcaagcggggccggtttgccgatatcatagccctgcatataatcaatccccagcgaaaccacagcctgccgaatctcgggcgtttcgacatattcggccaccacctgcatatttttcatcctcgccagaaggcaaatagaggcaacggcctgatagtccagactgctggtcaccagattacgaataaaactaccgtcgattttcagcagatccgcattcatcgttttcagccgcgcgtagctggcatagccggtgccaaagtcatcaatcgctacccgacagcccaggtcctgaagctgcgccagggttttccgcgcctgctcgggattggtcagtgaatggttctccgtcagctcaaaaataatctgccagggttcaatgtcataatgctccagcagcgtttttacctgctgatgaaaataactgttactcactgaaaacggcgagatatttatcgccaggcgcattccaggaagctttttgcgccgcttgtccataaagatcaacgtatgttcgaggacccagctatcgatacgcgccgacagtccaaactcgtgcgccactggtaaaaagacatccggcatgatgatttcatcgttgtcgttcagcattctcagcagaacttcatgatagctatccccccggatgccgacgatcggttgtgccatcagaacgaagcgatcgtgctccagcgccttcaccagctgattcattatcatgactttgtctttcagctcctgctgcgtattaatggcgccgcgacgctgtaaattttcaggacttccggtcgccagggaaaggtcagccgcgccgctgagttctccaagcagtaaatgcagatgcatcaccggagagcgaacgttgcaatagctgaatcccacgggcggctgcagcggcataccgttccagacaaagcgaaactttttgagatggtcaaacagcagggggactcgctgctgatggtcttcactgtgcagatggataaccagctcgtgcccggccatctgatagatatcctccccgggctgcaatagatcgccaagcgactcggccagcagctgcttgtactgaatgcgcaacagaacgccgtaatggcggcccaatatttccagctcgggaatgcgtaagaagcacagtactgaccaggaggatttatttaacgcccggctcagcgcgcggatattgggcaagcgtacaaccggatcaatgaaggccatccgccgcatacgcgcataaaaaattctctgctgcgtcgccagcatcgccatataggcgataataaatgaaaacaccagatagcttgaggagataatagccagctgattactgtaaatcggtgaatgcgggagatattgataatgaaagtggataataacaattaatataggggaccagaccaatgaaatgaagcgatagccaaaacgcatcgccccccacagcatcaccggcataagcaaggacaaggtataatttgtactaaaaatagtgctcgtactacttagcggcattaatagcaaaactaataaaattaacagcactaccgcccataaaataaactctaagggctttattttcggatcgatctgcaggcgaatctgagaaacaaaaccccgaatatagagcgggttgcggataattcgaatcagaaagtagcatagcggcacgccggtcaggcatccggccatcagggcctgaaaggtgataagcgaacgcaaacttaaggggttgaccccaatcaacccggtcgcgcgaggatggatccccaaatactcggcgagctgggaaaggataagaaagatcagcgatggcagcaacatttgccagaacaatcgttgaggcatcagtcgcacattgccatgcgagatttgctgccttcgcgggacaaaaacgcgatacccgccccagcaaaggacggtcggaataagaaagtggaaaatcacgccgatggaatcttccagcgccatgccgcgcgtaatggaaagcagcaaaccgacaacgatccccggtaaagcagcccagccgaaaaacagcatcaggctcagcactaacgccagaggtaaatagtaaagataaacttcattaccattcagtacagcaacggtgttcgcccatcttgccagggggagtaaaaggatgggtaagatgagcggcagcgaccaccatttatcccgatatcttctgtaaagtttaataatgttcatagatgctctacggataaccctaaatcctgcagggtatattcaggcaggcatccaaccaaccgtcataatcgcgcaaggaataacaacgcggaactggctggtgattttagttgtcggtgagaatagacgattgatataaatcaaaaaatcacgtcgctaatattaataatgtcttttttttaacatcaatttgcgataagcagaaagcatgtaaatacgaggattatcttatataacattaattaatgttttacccctgggatttttacatcctcatcaattgacccttccgcgttactgtgccttaatacgcacatcgcccatcctttgggtatactttaaggaaccttttgtgagtcaggcacccagtatgcgtaaacgacatcgatttaaccgtcgcatgacccgtatcgtactgcttatcagctttatcttcttctttggacgctttgtctactcctccatcggtgcctggtaccatcatcaggacaaaaagcaatcgcagcaatccactatcaccgttgaaccttcagatccgctaaaaacgccggtacaaaaataagcgcggtacgctgttcagcaaccggcctgagagagcaaacgcagcacttcagcgatgcctttgctgatgattttatcctgccgcatgacgatgcctaactgccgatacaggcgcggagtcaacgattgcacgttcaggccgacgcgatcctgcggatcctctaccgccatacgcggcacgatgctgtatcccagtcccgctcgcaccatccgcttaatcgcctcaatgctgcctaactgcatgactggcacgaccatcagtccattatggcgaaaccagccgtcaatcagatcccgggttccgctccccgcttcaaaagcaattagcggcaatgattgcagaacctctggcgtcagcggcgagggcaggtcgtcctgagcatcgctaaaaataccgacaaactcttcatctaaaaccggcgtcaccgccaggctgcgtccgttcgccggaagcgtacaaaggcccagatcaagccggttctcctcgatagcccgaaccacttccagggtattgccaaccgtgaccctcaccgtcagcagagggtgatcctgatgcagcttctgcagcagcggcggtaacaggtggatacaggcggtcgccccggtacccaacgttatcgagccgctgatttctcgattgaattcgctaaccgattgcactgccgcgcccaccgccagttcaatccgctcgctgtgcgccagcagggcgatgccggccgccgtcgctttgatgcctcgtcctgttcgctcaagcagtctggtttggagaaattgttccagctgacgtacctgcagacttaccgcaggctgcgacagccccagcaggtcagctgcggcggaaaagcttccgcgctgtaccaccaggcggaacgtcgccagatttcccagattgagcgtcatcatcacaaagtttctcttataagggtcataaatggaccggcctgcctccacaatagcgtgcagggtatgctgccgacaacagcgtaacaaaatggacgatcatgaaaacatctgcaaaaccactctccgcgccgggcgccgtcacgcttgccgccgggtgcaaccagctaataaactggggagtctcattttatatgcccggcactttcgccagagctattgctcaggagaccggctgggccgcaacggaaatctactttggcctgactatcgccatgctgatgatggcgatgctctccccgtttgtcgcccggctactggcccgctttgggggccaacgggtggtggtcacgggtacgctgatgatttcagcgggctgcctgataatggcttacgtccagagtctaccgggctggttcgccgcctgggttctgaccggcgccgggatgcgtctggcgctctacgacgcgctgttcgccgcgctggtgaatatctatgggcaaagcgccagattaactatctcgcgcgtgacgctggccggcggcctggcttcggctctgttctggccgctcggcgccgggttgttgacgcagatggactggcggcatgcgctgctgatttatgccctgtttggcctgcttagcgcgatgctgctgtggaaaatgccaaatcacagactgccgtcaccgaaacggataatgcaacgccagcggctctcccgccgcgataaacgccctgccctcctgtacgcgtcgctgattgcgctggtaacctttgtttccaacggtacctcgacgcatctccccgagtatatcgccagcgtcgggcttcctgtcgcggtgggaatgctgtgggggattgggcaaaccggcgcgcgctttctcgaagtggcatccggttctgtccttacgccgttgcggctaacgatactgaccaccctgttgatgccgctctgctttgcgctcggcctgagcgggccatatctgtcgtgggcggccggcggatttgtgctgggttacggcgcgatcaacggcctgacgaccgtttttaaagccactctgccgctgcagctttttgccgccgaggattatgcccgacgaaccggtattttgttgattcccgcgcagctgctggccgccgcctcgccgtttgcctacgcgtggctgaatgattatctcgggataaggggcagtttagcggtttccgccgcgctggccctggtggtggcagctctggcgatggccgttgcatggtgtcagcgggagaatacgccagcggcaattgaagaacggggttgacagtagaaacccggtgtatcggtattcatcgtctcagggaatgccgtaattcggcgatattgttaagaaaaatgccattaatgacgtcaatcattaatggcattatttttttattcaattaacgcaaagaataaagtttattcccactcaatggtcgccggcggcttaccgctgatgtcgtacaccacgcgggaaataccgttgacttcattgatgatacggttggatacgcggccgaggaaatcgtacggcagatgcgcccagtgagcggtcataaagtcgatggtttcaaccgcacgcagggaaacgacccagtcgtacttacggccatcgcccatgacgccgacggaacggaccggcaggaatacggtgaacgcctggctcactttgttgtacaggtcagctttgtgcagctcttcaatgaagattgcgtccgcgcggcgcagcaggtcgcagtactctttcttcacttcgcccagcacgcgcacgcccagacccggccccgggaacgggtggcggtacagcatatcgtacggcagacccagttcgaggccaatcttacgcacttcatctttgaacagctcgcgcagcggttcaacgaggcccatcttcatctctttcggcaggccgcccacgttgtggtgagatttaatgacgtgcgctttaccggttgcggaagcagcggactcgatgacgtcaggatagatggtcccttgcgccagccatttcacgtcttccagcttcagcgcttcttcgtcaaacacttcaacgaacacgcggccgatgattttacgcttcgcttccggatcgttttcgcccgccagcgcagccaggaaacgcgcctcgccttcgacatgaacgatgttcaggccgaagcgatcgccaaacatatccataacctgctgggcttcattcagacgcagcagaccgttatccacaaagacgcaggtcaggtttttgccgatggcgcggtgcagcagcatggcggtcacggaggaatccacgccgccggacaggccgaggatcactttatcgtcgccaacctgctgacgaatgcgctcgatggcatcgtcgataattttggccggggtccacagcgcttcacactggcagatatcgcgtacgaaacgctccagcatgcgcagaccctgacgggtgtgggtgacttccgggtggaactgtacgccgtagaaacgtttctcttcgttagccataatggcgaacgggcaggtttcggtgctggcaacggtgacgaagtcagacgggatggcggtgactttgtcgccgtggctcatccagacgtccagcatcggcttaccatccgcgctcagcgcatcttcgataccgtgaatcagggcgctatcggtctgcacttcaacctgcgcatagccaaactcacgttcattagaggcttcaacgtggccgcccagctgcatcgccatggtctgcatgccgtagcatacgccgaataccggcacgccggcttcaaagacatactgcggcgcgcgcgggctgttatcttcggtggtgctttccgggccgccggaaagaataatgccgttaggattaaactcacgaatttgagcttcagtcacgtcccatgcccacagttcacagtagacacctaattcacgaacgcgacgcgcaaccagctgggtgtactgagaaccgaagtccaggataagaatacgatgtttatgaatgttatccgtcattgacgataattccgaggcaagtgatacaggttaaataaatcgcccggcgcgtggccgggcgatgaaaatcaggagcccatgcggtagttcggggattccttggtgatagtcacgtcgtgaacgtggctctcctggatacccgcgccgctgatgcgtacgaattccgctttggtccgcagggtgtcgatggtaccacaaccggtcaggcccatacaggaacgcaggccgcccatctgctggtgaatgatctccttcaggcggcctttataggcgacgcggccttcgataccttccggtaccagtttgtcggcggcgttatcggtctggaagtagcgatcggaggaacctttagacatcgcgccaagggaacccataccgcggtaagatttgtacgaacggccctgatagagttcgatttcgcccggggactcttcggtaccggccagcattgagccaaccatgacggcggctgcgcctgcggcaatcgctttcgcaatatcgccggagaaacgaataccgccgtcggcgataaccgggataccggtgccttccagcgcttcaaccgcgtcagaaacggcggtgatctgcggaacgcccacgccggtcacgatacgagtcgtacagatggagccagggccgatccctactttcaccgcgctgcagccggcttccgccagcgcacgtgcgcccgcgccggtcgccacgttgccgccgatgatttgcaggtcagggtatttcgcacgggtatcgcggatacgctgcaatacgccttcagagtggccgtgagaggagtcgatcagcagaatatctacgcccgcggcaaccagcgcatccacgcgctcttcgttaccggcgcccgcacccaccgccgcaccgacgcgcaggcgaccctgctcatctttacaggcgtttggtttacgctccgctttctggaaatctttaacggtgatcatgccgagaagatggaagctgtcatccacaaccagcgctttctcaacgcgtttttcatgcattttggcaaaaaccacttcgcggctttcgccttcgcgaacggtcaccagacgctctttcggcgtcatataaacgctcaccggctgattcaggtcggtgacgaaacgcacgtcgcgaccggtgatgatgccgaccagctcgttgtcttcggtcaccaccggatagccagcaaaaccgttgcgttcagtcagctctttcacttcgcgcagagtggtggtcggcaggacggtctgcgggtcggtaaccacgccggactcatgcttcttcacgcgcttaacttcttccgcctggcgctcgatggacatgtttttatgaataaagccgatgccgccttcctgtgccagggcaattgccagacgcgcttccgtcacggtatccattgcagcagagagcattggaatattcagacgaatggttttcgtcagctgagtgctgagatcggcggtatttggcagaacggttgaatgagcgggaacgaggaggacgtcgtcaaacgtcagggcttctttagcgatacgtagcatgggcaatatctcgaccagggtggataaatattgccgtggcattatacagagcgtaaccgattgcatctacccttttttgcaaataatacttgcgatcccctcccagcaggttactatcgactgaataacctgctgatttagaatttgatcttgctcacatgttgccatctcaatccccctcaatttacacggttagccgcctcaatcagtcggttcgactgctgctcgaacgtgaaatgggtcaggtatggatcagcggcgagatttccaatttcagccagccctcttccggccactggtacttcaccctaaaagacgataacgcccaggtgcgctgcgcgatgttccgcaacagcaaccgccgcgtgacgttccgtccgcagcacgggcagcaggtgctggtccgcgccaatatcacgctgtacgagccgcgcggcgattatcagatcatcgtggaaagcatgcagcctgcgggcgaaggtctgcttcagcagaagtatgaacagctcaagaccgcgctggcggcggaaggcttgttcgatcagcagcataaaaaaacgctcccctctcccgcgcactgcgtcggcgtcatcacctctaaaaccggtgctgcgctgcacgatattttacacgtgctcaagcgccgcgatccttccctgccggtgattatttacccgaccgccgtccagggggaagatgcgccggggcagatcgttcgcgcgattgagctggccaacgcgcgccaggagtgcgacgtgctgattgtcgggcgcggcggcggttcgctggaagatttatggagctttaacgatgagcgagtggcgcgggcgatttttgccagccctattgccatcgtcagcgccgtaggccatgagactgacgtcactatcgccgattttgtcgccgacctgcgcgcgccgacgccttccgcggcggcggaaatggtcagccgcaaccagcaggagctgctgcgccagctccagtccgggcagcagcgccttgaaatggcgatggactacttccttgccaaccgccatcgtcgctttacccaggtttttcaccgcctgcagcagcagcatcctcagctgcggctggcccgtcagcaaacggagcttgaaagattgcgtcagcgcatgcgtttcgctcttgagacgcaaataaagcgcgccgaccagcgccagcagcgcgccgcgcagcgcctgaatcaacaaaacccacagccgcgaattcaccgcgcccagagccgtattcaacagctggaataccggctggcggaaaacatccgagcgcgtcttggcgagcaacgtgaacgcttcggtaatatggtcacgcacctggaagccgtcagcccgctggcgacgctggcccgcggctatagcgtcacttccgccagcgacggcaaggtgctgaaacaaacgaaacaggtgcgcgagggagacgttctcactacccgcctgaacgatggctgggtagagagcgaagtgaagaacatcacgccggtgaagaaaacccgttcccgcaaaaaagccggataagcctgccatttcgaccgaggataactatactgctgtcatgccctttttaaacggttctatccggctaaggagcgtgatatgccagatgcttatcctcgttatgtaattccgccctacattttacgccgcattgtcgatcgcggttcccttcagcagcagcgctgcgcgcagaataccctcagccacgttcagaccctgatggcgcacgttccggggcgccctgccgcgccccacgtcaccacgccgggcctgcttgaacgcgacatttatgatgccgggcagacccaggatctaccgggtactcaggtccgttttgagggacagccctccaacggcgacgttgccgttgatgaagcctatgactatctcggcatcacccatgattttttctggaagagctaccagcgcgattcgctggataaccgcggattgaagctcaccggcagcgtccactatggtcacgaatatcaaaacgcattctggaacggccaacaaatggtgtttggcgacggggatggcgagatttttaatcgttttactatcgccattgacgtagtggcgcacgaactaagccacggcgtgacggagagcgaagccggtctcatctatttcgaacaatccggcgcgctgaacgaatcgctttccgatgttttcggttcgctggtcaaacagtatcagcgccagcagacggcagacaaagcggactggatcattggcgaggggctactcgcgaaaggcatccacggcaaaggtctgcgctcaatgtcgcagccgggtaccgcatacgatgaccctgtccttggcaaagatccgcaacccgcccatatgaaagattttgttcatacccagcaggataacggcggcgtgcatatcaactccggcattcctaatcacgccttttatctcgccgccagcgccctcggcggttttgcatgggagaaagcgggatacgcctggtacgacgcggtgtgcgatcaatctctggcaaaagacgccgatttctcagcctttgccaggctgacgattcgccacggcgagaaacgctctggcaaagaggccgcagaggcgattactcaggcctgggagcgggtcggagtggtgctatgaatcttgccgatcttagcgatgacgcggtgattgagctggcgcgcgagggtggcgttgcctggatcccggcgctcagcgggatgcgtaagatcgtcgtggcgaagctcaacgagcaacagaagcagcggatcgcgacgattctccaacagtcgctaccgctgggcaagccgccgggccagcccgactcgcctggccggggcgaccagcgtttttttcgcatccagatcgttagcgagcagcgctaccacagcctgattattctcatcccggaggatcgtgcgccagattcactggttgaactctggcgcgacggcgaaggctgcgtcagcgataaagattaaatcggcacaaactcgacgcgttttttcgaaatcagcccgtggccattctggcaaaaataatccaccgcgccgcaggcttttaacacctccagcggcttgtggcagtccgggcagcgggcttcgacaacatactctttcgcacaacgctcgcagcgggcgctattgccctgcacagcaagctgcgtatggcacacggggcaatcaaattccatggtgactcctgacgacgggtatatcgctttattttatcacggttgcacaatctgtggctgctgccagtcattatcctccagcaggttattcgcccccaggcggtccgccacctttaattttattcaccctgcatactgaatcgggactgagcaaaagcatcatagacctgcttatcggtaaacggcggaaaagtggcccgtttagcggcatcaaccagcgcggcacaataggctttatgaccttcactcgttgtcacgctattcagtttcccctcatcgctaaatctcagatgtattgtgcatttttttcccgtccagccgtagcgattggataaccgggaatcaatagactcttttatcgctctcgcctgtttgccatatttatcgtcatcgctgaagcgtccggagctacagctcccaagcgctgatgtcttatgacagtcagaaggatgaaacggcgtacagctgctggctaaaataaccaaaccgaccatcactattgtttttttcatatccctgcccccatcgtttgacacgattctcccctacgctcatttacccgtgttctactttagcgaaaagggacgccgctgctttgaatactgccgggctggtttggcgctggcacctctacgcaaagcggccccggcgtgaaatgaatggtaatgatgttattgctggaaggcttccctttgacgtatcgccatttttccattgcggccctgacttcattatcaaacattccggaaggatcggagcttaataaccgaacgtgagtcacccgcccattctcatcaacgtcaaattgcgctttaaccaggcccggtatcccttttttttcggctttcgcgggataagcaggcttaacgcgtggttcaatcggttgtgattcagcggcacaggctatgggaataagaaacagcatcaggagggttaaaaggcgtttcattcagacctcattgtcacaaaaatatttatcctccctggtttgtctcacatttataacccggcctcaagcgagtttattattctgcgcatgtacaatggcgataataaaaaagcccggcggatgcgggctttaggtttttgatgctggcagatagcttatttgcttttcttgatgtgcttaatcaagcgtttacgcttacgcatctggttcggcgtcagggtattgcgtttgttggcaaacgggttttccccttccttgaactgaatacgaatcggcgtgcccatcacttccagcgatttacggaagtagttcatcaggtagcgtttataagaatccggcagatctttaacctggttaccgtgaataaccacgatcggcgggttataaccaccggcgtgggcatatttcagcttcacgcgacggccgcgcaccagcggtggctgatggtcttcagcagccatggtcatgatgcgggtcagcatagcggtacccacgcgacgggttgcgctgtcgtacgcctcgcgcacggattcaaacagattgcctacgccgctgccgtgcagcgcggagataaagtgcacgcgggcaaagtcgataaagcccagacggaagtccagggtctctttcacctgctcttttacttcctggctcaggccgtcccatttattgacgacaatcaccagcgaacgaccgctgttgaggataaagcccagcagggagagatcctgatcggaaatcccttcgcgcgcatcaatcaccagcagcaccacgttggcgtcttcaatcgcctgcagcgttttgatcaccgagaatttttcgacgacatcggtaattttgccgcgcttgcgcacgcctgcggtatcgataaggacgtattcacgctcatcgcgctgcatcgggatgtagatgctgtcgcgagtggttcccggcatatcgtaaaccaccacacgatcttcacccaggatacggttggtgagcgttgatttacccacgttcgggcggcccacaatcgccagcttaatcggcagatcctgcgggttaaaatcatcttccggctcttcaagcgcttcgccgttctgctcggcttcgaactgcgcccagtatgctgcgtcttcgtccacttcttccggcgggttcacctcgtcaacccacggcagcagcacgtgctcgagcaggctggtgacgccgcggccatgggaagcggcgataggataaatctcgcctaaccccagcgaccaaaaatcggcaatcgcctgatcggcatcgataccgtcagttttgtttgccaccaggaaagtcggtttctcacgggagcgcagatgtttcgcaattgccgaatccgccggcatcaggcccgcacgcgcatcgaccataaacagcaccacgtccgcttcttcaatcgccagcagcgactgttccgccattcgcgtttctacgccatcttcggtaccgtcgatcccgccggtatcgatacagataaattcgcggccttccacttcagcacgaccgtacttacggtcacgagtcagccccgggaaatccgcgaccaacgcatcgcgagtgcgcgttaagcggttaaagagcgtggattttccaacgttagggcgcccgacaagcgcgaccacaggtatcatgttaaatgcctcatacaaaaatcgatacaacgcccgttttcacggcgtttttaaaaaagccaaaacggcccctgtctgccaggggccgtttctcaaaaatagactaccgctgttgttaacgcgtaatcgcgtacagcgtgccgtctttcgcctgaatcagcagtttgccgtcagcaacaaccggatcggtcaggaagcctgagctgtccaccttctgctgagccacaaagtgaccatcttcagggttgacccagtgcatatagccttcgctatcgccaacaaccagattgccattatacagcacaggcgccgtcagcaggcggtgcagcagatcgctttgcgtccacagcgtcacgccgccgtcggtggtgagcgccagcagacggtcattctggtcaaccaggtaaatacggttgccgtcgacaatgaaatcgttcactgaacccagctcgcgtttccacataatctggccgctgcgcagatccagcgccgtcaggttgccgttgtaggccagcgcgtaaatcacgccgttcacgataaccggcgtcgtgtcgacgtcgttaagacggtcgatttcggtcggaccggtcgcggtagagatacgctgctgccaaatcatctggccctgctgcatcagcaccgcgctgacgcgaccgttgtcgccgcctacaatagctgcgccgtaggcggtagccggagcggattcgccgcgcagggagagcgctggcatatcaaggttaacggtccatttcaccgcgccatcggcttcgttcagcgcctgaagctgaccgttagtggtatgaatcagcaccatgccgtcgctgacgaccggacgagaaatcgcttcacccgccacgctcgcttcccacgcgacggtgccgtcgctggtgttcagcgcataaactttcgctttttcgctaccgatataaacgtggccgccggagacggtcacgccgccggagagcagcgcaggcgcgcgggagaaccagccgtctttctctgccagattaaccgaccacacctctttgccgtcgcctgaattaagggctttaacggtacctttacgatctgcggcatacacgacgccatcagcaaaagccgggtgcaggttagagtagaattcgccaataccgccgccaacggaggtgctccaggaggtggacggcgtaaactggttttccaccgtcggcagtggcgacattttcaccacatcttcttcgctgttaaacagcgaacagccgctcaataaggtaacggaaagcagccctggcagaagtaatttacgcaattgcatcgagtccctctcagatggacaaattatttattttcatacgcatcatttcgctgagcgccggtgaggcatcgcttttcgcgcccgcttcccatgctgctttcgccccttgcttatcgcctttgctcagcaggatctcgccgcgcaggtcagcgacaattgcggtccagccttcgcctttcacggcatccagggttttcagcgcggcatcaggctgcttaagctgcagctggacgcgagcaagacgcatattgataaccgatttcaggttatcatcagaagcggccgtaagcccctgctgaagctgcttttcagcgttctgcaggtcgtttttatcgacaaactgctgcgccagctcaagagaagcaaacgcaccataggtgtttttgctgtcggcggcaaatttctgcgcagcgttcagcgcttctggtttatccgatttgagggcggaaatcgcattttcataagccagagacgagcctctggcggtatccaactgatgggaggtccagtagcgccagccaaccagcgcgccaacgcccaaaatcaccccaacggccagcgccttgccattttcagcaaagaaacgcttcagcgcgtcgacctgatcgttttcgttattgtaaagttccacgcagtccttctcctgactaatgattcccgggagattaacccagaagtgtgcgcaaatgcgcggcaacgctatcctgcgttacggtagtttgctctcctgagcgtaaatctttcactaccacgtttccgtcagcgatttctgattcgcccagcaccagcgcaacgcgagcgccccatttatcagcgcgcgcaaactgcttcttaaagttgccgccgccgtggttggtcatcagcttaacgccgggtaacgcatcgcgtacctgttcagccagacgcattgctgcggactgggtgtcagttccggaggctaccaggtatatatcgacaacaggatcggctttaaattccggattcactgcctgaaccagtaaaacaagacgttccagccccatcgcaaagccgacgccaggggttgcgcgaccgccaagctgctcaaccagaccatcgtaacggccgccggcgcagacggtgccctgggaaccgaggctggttgtgacccactcaaacacggtgcggttgtaatagtcgagaccgcgcaccagacgctgattcacggtatagcggataccggcatcatccagcagcgcgcaaagtcccgcaaaatgcgctctggactcttcatcaagatagtcgcccagcgtcggggcgtcgttcagcagcgcctggacgtccgggtttttagaatccagcacgcgcagcgggttagtgtacatgcggcgtttgcagtcttcgtccagcttatctttatactgctcaagataggccaccagcgcgtcgcgatagttagcgcgagcctccagcgaaccgatagagttcagctccagcgcaacgtggctggaaatgcccagctcgcgccaccagcgggcggtcagcataatcagctcggcatcaatatccggcccctgcagaccgaacgcttccgcgccaatctggtggaactggcgataacgccctttttgcggacgttcgtggcggaacatcggcccgatataccacaggcgctgttcttgattgtacaggagaccatgttcgatgccggcgcgtacgcagccagcggtaccttccggacgcagagtcaggctatcgccgttacggtcctcaaaggtgtacatctctttttcaaccacgtcggtcacttcgccgatagcgcgtttgaataacggggtctgctctacaatcggcaaacggatttcgctgtaaccgtagctaccaagcacctgcttcagtgagccttcaatgcgctgccagagagcggtttcgcccggcagataatcgttcatgccacggatggcttgaatgttctttgccacgtttattctctttatatatacaaaaatgaaccccggcgcctcgcgcccgcaggttcaatcatacacgggaagcgtatcgcttcccaacacgttatttcgcttcaacctgctgaatatcgatgcgacgcgcctcatcaagcatcgatgctttagcgcgaatacgcgcttccagctgatcgatcatatcgtcgttatccagtcggtctttacgtacgccgtcttcgtacaggccgcttttcttgttgccgccggtcacgccgagggtggaaaccagcgcctcgccgggaccgtttaccacgcagccaatgatcgaaatatccatcggcgtaatgatatcttccaggcgctgctccagcgcgttaacggtaccgataacgtcaaactcctgacgtgaacatgtcgggcaggcaatgaagttgattccgcgagagcgaatgcgcagcgacttgagaatatcgaagcccactttgatctcttcaaccggatccgccgccagggagacgcgcagcgtatcgccgatcccttcagacagcagcaggccgaggccgatcgcggacttcaccgcgccgctgcgcgccccgcccgcttcggtgatcccgaggtgcagaggctgatcgatctgtttcgccagcaggcggtaggattcaaccgccaggaacacatcggaagctttcacgctgactttaaaccgatcgaagttgagacgatcgaggtgatcgacatggcgcattgccgattccagcagcgcctgcggggtgggttcaccgtatttttcctggagatctttttccagagagccggcgttcaccccgatgcggatagggatatttttatcgcgagcgcagtccaccaccatgcggatacgctcttcgttgccgatattgcccgggttaatgcgcaggcaatcaacgccgtattccgctaccttcagggcaatgcggtaatcgaagtggatatcggcaaccagcggtacgctaacctgctgtttgataagcttgaacgcttccgccgcgtccatcgtcggcaccgaaacgcgcacgatatccgcgccaacgcgctcaagggctttaatttgatttaccgtcgccgccacatcggtggtgcgcgtgtttgtcatcgactgtacggcgatgggagcgccatcgccaatcggcacattcccaacgtaaattcgctttgattttctacgttgaatcggagcctggttatgcatgaaaaatctcccgcgttacccgtctattactgcgccggtgattgttcggcattgagggtcagacgtgcaacctggttagttctgataaaacgactcaaatcgactggtttacccagatactgtatctgtaccgccgccggggcaccgattttcagcttataaggcgcctgaccgctcagattgaggttaccgcctttacgctgtaaaccgctgaacagctttttaccggtcgcatcgctcacttccagccagcagtcggcggtaaaattcagcaccagatcctgggcggaggccgccgcagcggtcacgtttgcctggtcggtcggtaacggcgaagttgccggcgctgccgccgtatcgacgttggcctgagaaggcgcgacaacggcgttattctcggccagagccggggccggggccgacgccgctggcgccggagacgtttctacaggcgcgctgttggcggcggtatccggtgcagaattcgccgattgattatccagagggatgctttggctgttgctatcgcccgcattcagttcggcggaggattgatcggccatcgtggagatctcgtcctgctgcgctttgtggtcctgccaccaccaggcgccgctgaggccaatcaccacgaacagcaccagccaggtaaagctcattagccagccgtcgcgctttttacggcgtttacccagcgagaagctctgcatgggggcaactttcgccgcccggatcggagcctgcttggccatcatcggcagcagctcttcttcaggaatgtgcacaaggcgggcataagagcggatatagccgcgcaggaaggttgaagcaagatcggcgggtgccttatcgtcttcaatatcacgaaccgtggaaaccttcaggcataagcgttcagccaccgcctgctggctgagcccgagttgttcgcgggcattacgcagacgcgcgcccgtggtgtttgcttcttgatggtcttgagtggcttcagtattcattcgctacaactactggtacgtgaaatttaaaattcagcgccggtgaccccgcgccgcgagacatctgctcaacgtcagacaaacagtataagtccgtatgacctggtatcacagagacttatcaatattgaatgctaagcggttgttgtaccgctacatactgcctcaaagtcgacaaaaacgcaccgtaattattaaccacaacagcgtatttcgcccggcgattccacataaatatgcagcgcaccgccagggctgtgcgctgcatcattgattatcagaccgccttcacgtcgatggcttcgccctgcatacgtttacgcagcgtacgcttggtacggtcgataacgtcgccggccagctgaccgcatgcggcatcaatatcgtcgccgcgggttttacgcacgatcgtggtgaaaccatactccattaacaccttggagaaacggtcgatacggctgttggagctacggccatacggcgcgcccgggaaggggttccatgggatcaggttgattttgcacggcgtatctttcagcagcgcggccagctcgtgcgcatgctcggtgccgtcgttgacgtgatccagcatgacgtattcgatagtgacgcgtccctggttggcgttggacttcgaaatatagccacgcaccgagttcaggaaggtctcaatattgtatttcttgttgatcggcacgatttcatcacgaatggtatcgttcggcgcgtgcagagagatggccagcgcgacgtcaatcatatcgccaagcttatcgagcgccggcaccacgccggaagtggagagcgtgacgcgacgtttagagagaccaaaaccgaagtcatcgagcatgatctccatggccggcaccacgttagtcaggttcagcagcggctcgcccatccccatcatcaccacgttggtaatcggacgtacgccggtggtcttcaccgcgccgacgattttcgccgcgcgccagacctggccgataatttccgaaacccgcaggttgcggttaaagccctgctgggccgtagagcagaatttacactccagcgcgcagcccacctgggaagaaacgcacagggtggcgcgatcgtcttccgggatatacacggtttcgacgcgctgatcgccaacggcaatcgcccacttaatggtaccgtcgctggagcgctgctcttcaacgacttccggggcgcgaatctccgcgacttcctttaatttgccgcgcagaactttgttgatatcggtcatctcgtcaaagttatcgcagcagtagtgatacatccatttcatcacctgatcggcgcggaaaggcttttcgcccatgtttttgaaaaactcgcgcagctgctgacgattcaaatccagcaggttgattttggcatctttgttcggcaccgtcagagcggcgctatcaggtgtgactatttgttcagacataattgattccggcctcgttattacacgttatggcccctggagggttgaaaaaagaaacgccccgggagcgactgctcatccggggcgctgtattctacaaattctggtccatcaataccacgtttgcacgcagcaatgatgaaaaaatctgtaactgcctggcagatcctctaaggattttcgattgtcgcaaggcggtaagcaagtgaagccccgggagcatagataagcgaccggggtgaacgcgcgcagccaacacagcgatagtcgaaaagacgacgaggatgggtatctccaaagtattttacgtcacggcgaggcggcgaattcgcaaatcccgggagcatagataactatgtgaccggggtgcgcgaatgaagccaacaaagcggtggcgtgaaagacgcgggagattagcgggtgcgcgggcaaacctcgccttcagcaaagaaaaacgcgatctcgcgcgcagcggattcaacggaatcggaaccgtgggtgccgttctcggtgaagctgtcagcgtagtctgcgcgcagggtacccgccagcgcgttcgccgggttggttgcgccaagcaggtcacgatgacgctgaaccgcattttcgccttccagcacggaaaccacgatcgggccggaagtcatgaattcaaccagaccgtcaaagaacgggcgaccttcgtgctcagcatagaagccgcgagcctgctcaacggtcagatgcagcattttggtgccaacaattttgaaccctgcagcttcaaagcgagaaaagatgccgccaataacgttttttgccaccgcgtttggtttgatgatggaaaaagtacgttcaatagccatgataacctctttatatatgttgttctgttttgcagatgagcagatgagaccgataaatacggcgcgaattataatcatcatctaaggcgattgcctatgtgtttaggtaacatttttttaaaaaaaagcgaccttaaacaacaaatcccgccaattaaggcacgttacgtttattgcacggtgaagttcacggcaacaatttgccccgcctcgtccatcactaccagctgataacggtcagggcgatcgatgttaagggtcgcgctggcgccttccgccggcagaggctcaccgttaagaaaccaccagcggcgcccctccccgccggtcgtttgcagcggcagcatcaccttttgctcgccgggcagccgtttaaccaccgcgccttcacgaagaccggagagcaccagcggagcggcatccgcggtttgcaccggcggacacgccgccgaaaccgcaggcagcctgacgcgacgccgttcgcctgcgggtagccagggttcaagcggcaggggccagacgtcgaggcttttctctaccgcgccggggcaatctgccgccacccgcagccctttctcattcagccataccgggaagcgaatcccgcggataccttcctggccgggcagcaggagggtcggcggctggctctcatcgagcaaccaggtggccagccgtcggcggcagttcgcgtcgcccgcgggtaaattctgcccgccgggccagcaaaccgtcccggcgctgaccgacgacgggcgagggtcggccggcaatccgccgcggctcatcgccgggcgcgccagcagcatattattcacctggttcagcagcggcaccgcgctggcgaagccaaactgcccgacgaccggcgtgccgtcgggtcgcccggtccagatacctatcagatagcgggcgttcacgccgatcgcccaggcatcgcggtagccgtagctggttccggttttccacgccagcggcaccacctgcaccagcgacgcatcgggcaccggctgcgcttcgccggccagtatgcgccgcacgatccacgcggcgcccggcgacagcagcggcctctcaaccagcggtgagtctggcgtgatgcgcaattgtcccgccttaccatggcgggcgaacgcgctgtacgccgccacgatatccgccagacgcgcgccgcctccgccgaggatcagcgacagattcggctccgcgccggcgggcagcatcagcggcaatccggcattgcgtagcctggcggcaaaacgcttcggcccgtaggcctccagcacctgcactgccggaaggttcagcgagcgaaccagcgcgtcgctggcgctcaccggcccgtgaaaaccgctgtcaaaattccccggccggtagtcgctaaaccgtcgcggcacatcctgtaacaacgaagccggatggatcagcccctcatccagcgccataccataaacaaacggcttcagaaccgagcccggggagcggatcgccgagaccatatcaatatgaccaaagcggctatcatcgttgatatccaccgaccctacccaaccgcgcaccttcatattggtatggtcgaccacgatcatcgctaaagagctgcgcggcggcaggcgcgatttccagttcagcgccaggtcttccagctgccgctgcagtccggcatccagcgtcgttaccaccttctctgcgcggctgctcgccagcgcgcggcgggcaaaaagcggcgccagctgcggcatctgccgcggaaagagccagacgggctcttcgatagcttctcgtaccggctgcgccggccacacgccctgattttccatccgcagcagcaccttatcgcgcgccgcctgcgctcgctccggccagcgatccggacgcagcctgctcggcgcctgcggcagtaccgccagcagcgccgcttcgccatagctgagctgcgcgggcggtttaccgagataggcccagctggctgcgccgatcccctgcagcgtaccgccgaacggcgcccggttgaggtagagcgtgaggatctcgctttttgacagatgccactccagctgcagcgcgcgccatagctgacgcagcttgccgccaaaggttcggggatgcggatcgagcaggcgcgccacctgcatggtcagggtgctgcccccagagatcacccgcccggaagtgagatcctgccaggcagcgcgaacgatcgagaacggattaacgccggggtgatcccagaaccagcgatcttcatactggatcagcgcctgtaaatagcgcggcgaaacgtcagccagggtcaccggatagcgccaaacgccctgcgcgtcggcgaaacgccacagcggcgtcccgtcttccgccaccaccactcgggcaggcgtcacctcgcgcagcggcagcggccacaggcgatcggcggccagcagcagcagccacagcaaaaaaataaacgccgccagccagcgccagcggcgtttaatgcgcttcagtgcccgcatttagggtgcaacggtgagcggtccgctggccgcgccggttgcccgccactgcggcacgtacattgactcgacctgcggctgcggtacctgataggtgcccggcgtcaccgcgcgcgccagataaaccagcgtcaccggctggccttcattgatagccaccgcggcgacgaagcgatcgtcgcgaaactcaatgtgctgaatatcggcctgctgcatctggttaagcagattctgcaccacctcgccgttctcctgcaggctggcgctgctgttggccagattctggttttccagctccagccccgccgggagtaaatccaccaccagcgcgtccgggacgttacgcttagccgtcacttccagcttcaccagcaccagttcgccgctgcgcagcgaagagagcgatttctgctggccctgggtatcgaaaatttgccgttcaatgccgagtacgttgccccccggctgcggcgcgttctgcggatatccgctgctgtcgagacggagccacagcggctgctggccggtattggtcacctgcaaggccgccagctggtcgccggtcaggttgcgggtttgcgctttctcgccggagagcggttcggcctgcacggaggtttgcgcctgccagctgccggggagatcctgcagcgtacgcccggccaggaacagggcgttactctcctgcgtcgagagccagcgctggccgtaggcttcgtccgccagatggctgagcagcgtattttgcgcttccggcagcagtttgttctcctccagcagcgccagcttcagcgcatcgtcgcgcagctcgctgccgtaatcgccgagccagcgattcgcgtcctgccgcggcgtcgtcagcgccagcttcagggcttcgccgccgcgcggcgcatcgcccatcaatttcagggccacgcccagctgcagcagcggcagaccggaacgcgcctggtcgtgacggctccagatttcgcgcagcgcgccgagcggcgctttctgctgccgggccagtaccagcgcggcgtaggcctgagcggcaaagcggctggcctgggcatcatcgctatagcggacggtcatcagccccggctcctgtaaataacgcagcaggcgctggttgccgttattgacggcgttcgttggtacgctgtagccctgctcgcccgcccggacgaggaagtccatcgcgtaggcgctcaaccagtactcctccggcccttctttatcccacagggcgaaaccgccatcatcgcgctgcatctgcagcagacgagaaatgccgatatccaccgccgcgcgtcgcttttcatcgctatcgccgccgatccccagggctttaagctgggcggcgttggtatagagcgacgggaacagcccgctggtggtctgctccaggcagccgtaaggataggctttcaggtcgcgtatatagcgcgccaggttcagcggcggcttaccgctgaacaccagctgcccctgcaacgtcgcgggcgagaagccctcgctttgcgccgccggagcctgccagctttcacccggctggaggacagcgccggaattcacggtttgcgccgggaaagccggacgcacgcccagctgccactgcttctgcatcggcgcgaaggtttcacccggcaggttcaggccgctgatggtggcattcacctgaccatcgccaaagccttgctgcgcgcgaaccggcacaaacagcgtgctgcgcgcgccgggagccagatgcaccggcggtatttctcccccttcaagctgcagcagaccgctggcggccagcgcaacgttgagggtctgcggcttatcggtcagattgctgagatccagcgccaggcgagtggtatctccgctggcgaggaagcgcggcatattcagctcggcaataaccggcgccgccacgatcgtttttccttcgctgctgccaaaatcctcagcggtccacgcctgggccataacccgcagttcgccgttaaagtcgccaatcggcaaagtcaccgtcccttcgcctttctcatccagcaccaccggctgcgcctgctgagcgataatcgtcacgtgattaaccggcggtttgccgccgcgtttgagttcatcaccgtcgccgccgaagcgcaggctggcgagtctcccctgcccttcgatcacctgaccatagatatcgtaaatatcggcgccgtagcgtttctggccaaagaaagcgttccacggatctggcgttgcatagtcggtgatattaagtacgccgctatcgacggcggagagcagcacgttaacctgtttcggcgtctcgccttctttgacgctggccttaacgttgaccttcagcggctggttggggcgcattttatccggcgcttccagcgtcaggttcagacggcgattttcatcgccaagcggcagatgcagcagacccaccgcccgttttggcgtcgcggactgggatttatcccccggacgaatcaccagggtgctgaggtagaggtcgtgacgattccacgctttatccaccgggatcgatagctccatcccttccgccgggacgtcaatctcctgccaccacagcggcccttcgcttgattccaccagcgcgtagcctttaccggctgccggagcggcgatatgcagcttgatcgtatcgcccggtttataggccggtttgtccagcttcatggtgacgcggtccggacgcgccgccccctggccatcgctgttatcctgccagctgtatccggcccagaagcgcacgctgctgaccgcatcatccggccctttaacttccaggcgataagaaccccactcgaccgggaagctcactttcgccgtttgtccggctgaaatatccagcgactcctcgccttcctgaagatctttttgatcgaactgcgactgccagccttcgctctcggaccagttccagtagtagtcgcggcgttcgcgaatcaaccgaacctgcagcccggagaccgctttcttctcacctttggcgtcggcatacacaatctcaaacgcggcggtgccgttttcatccaccaccggctgcttgatagtgctgtcggtgcgatagtcgtaaacctctttcagggcaaattccggtcggatacccggcagcgtttcggccggccagatcggctgcctgacgatgcgcgtgaccggtctgccgccggactccagcaggctggcctgcaggatcacctgcagcggcgagcggctctcctgccactggctggcggcggtgacttccgcatgtccgcgatcgtccagggtggtctgtacttcatccaggctgcgggaaaggttctcttcggcaatgtcgccaaactggaagcccggcagcgcaggcaccgcatcgcgcagcggacgcaggaacagtttaccctgcagcgggttgccgctggccggcgcgccgtacagatacgccccgctcacggcaaagctgacatccgcagccggcgaaaccggggcattttgcggcgtgagattcagcgccatgcgctcaggcataaaatcttcaacgtgaaaatcccactcgcgcggctggttgtcgccggtgctggcgcgaatgtgccacatcccggtcgccgcgccgctatcgagcggataagtcaactgatacaggccgttaaccggtttgctgaccgtcgaacgaataacctggccatccggctgcacgacttccagcttcaccggctgctcggggagcggtttaccgtcgctatcgcgcagtagcgcgttgagaataaccgtttcgcccggacgatagagatcccgtgggccaaacataaatagctgcttgctgaagcccggcgcaccggcgatggaaaattcagccaggtccagcgccggaagtttgagatccagcagagtggtttgcccgtccttacgcgccagcagcagcgccgcttctttgtccgtttgcagcgtcacgtgcccctgagcgtcgctcttcgcctgcgccagggtttgccctttggcgttcagcagctgcacatcgataccggactgcgccgcgccgttttccaggctctgggtaaagacatccagccggttgtggtagcggtgcgcggatacgccgatatcgctgagggtgaacagcgtcgcggcgttgctatagctgtagcggcccgcctggttcatcaccgcgatatagacgcccggctcctgcaacggcttgatatccgccagcggcagcagcagtttttcgcgcgtattgcgcgccgggttaaggtcaaaacggccggtgtagaccagatcggccatcttcagcagctcgtccgactcccagttgctcagggaattgcggtattcccattggctgacgaaggcggagagcgattcaggtttgatgcggaaaaaattgacgtcgatgttatcgacattcagcgccatcaccggcagtccggccaccactttccccggcagcagcgagccgcggctggcaaagccgatgctcggggcgatatcgcgggtggtaatggttttttcaacgctgctgtctaaggtcgctttattcagcgcggtcagggtggggtcgagcgaaacgatcagctcgcgttttggctcaagatggcgtagacgcagctctttaaggttgggcgccagctcccatgccccatcgactttgccgctttttttgtcgaccagatgcacgctgcgggagaaatcctgatccggctgcagaggaatagagaaggtcagcaccagcgtcgccgcgccgtcgagctgaacttcagaagcatccagcagcgttaacgctttgcctttgcttttttcagccagcgccgccagctgggcgctgtccggcttcgcgggagcgctatctgccgccgcggatggcgccgacgcgaccgcctgcggtttgccgctgtcgtcacaggcggtcaacgatagcgcggtaagtagcgccagagatagcgccgccaaacgaaatggtttcatccttctaacccctcggcccgcaggccagataaattcagtgaacacattattatgcgttaacggcagaattaccaatagcgcgctagcaagcaatattggtagggaccacggatagcaggagtggattaatttaacggatataccacgctacgatttttcttatatcaacttttaatatcctcagctatcgatactttttattctgaaatcccattctctccgcccatataaattgacaaggcgcgcgttttctatttattgttcgggatatcattgcctttaaaatataaattattacgccggcgatgatattgactgtacgttccagcgtttaccagatagcacaacatcaacccatctcatataaatatatatgggattaataatatggaagttatttatgtctcagatggtcgcactgtcgattattattttaattctttatatcggcgacgttgtttcaacccgcacaaaagcctggattccttccgtatttgtctgtgcggtcctgtttttaatcgggtactggacatttttcccggcagatattatcagccgggccggaatcggcacgccggttgccataatgctgatgtatctgttaatcaccaatatgggcaccctgctgtcgctaaaagagctggcgcagcagtggaagaccgtggtcatctccctcgccggcattgccgggatcgcggcggcggtctttgcggtgagcctggcgctgttcgaccgcaacaccgcgctggtcaccattcctccgctggtcggcggtatcgtctcatcgctgattatgtcgcagggcgcgagcagcgccggcctggtcgacctgtcggtttttgccattttgatttacgtgatgcaggggtttgccggatatccgctcaccgccatcatgctgcagcgcgaaggtaaaacgctgcttgcccgctaccgcagcggcgagcaccgacccgataacatcgccgatgagcacgcgatgctcaccgttggtgaggagaaaatgccgcgcctgttcagtaaaatccccgttagctacaacagcaactactttaaattcctgcggctggcgctggtcggctgtctggcctggcttgtcgccgacctcgcgaagccgatagtgaatatcagccccttcgtgctgtgcctgttttttggcgtagtgtttacctcgttaggctttcttgaaaaacatatgctgcataaggcgaacggctttggcttcgccattatggcattgatgctatttatctttgataccttaaacaaagccacgccggagatgctgctgcgcctgcttttcccgatggtggtgttaatcgccacggcggcgatcgggatgtttgtggtctcctggctggtcgggaaactgcttggcgtcagcggcccgatggctttcgccatctcattgaccgcgctgtacggtttccccgccgactatattattaccaacgaggccattaacgccctcacccacgatgaaaaagagcgccagatgctgacccaccatatgctgggcccgatgctggtcggcggattcgtctccgtcaccatggtttcggtggtgttagccggaattctggtcggctatctgacccccgctgtcggctgagcgcgttgaatttttagcaaatgatggagccattgatgattaaccctgacatcaccgcgattatcgccagagaagaacaggcgatgatcgcttttcgtcgcgacctgcacgcccatccggaacttccttgggaggagaagcgcaccacggatcgcgtcgccgccggactggaggccatcggtatcccttaccgccggacgcatcccaccggaatcatcgccgacatcgccggcggccagccgggtaaaaccgtggctctgcgcgccgatatggatgcgttaccggtggtggagctgaacgacccgctcgactataaatcacaaactcccgggaaaatgcacgcctgcggccatgacgcccataccgccatgctgctgaccgccgcccgtgcgttatatgacgtccgcgagcagctggcgggcaacgtccggctgatctttcagcctgcggaagagattgccgagggggcgaaggcgatgattcagcagggggctatcgataacgtggataacgttttcgggatgcatatctggtccggcacgccgtccggcaaaatctcctgcaacgtcggttcctcctttgcctcagccgatttgctgaaagtgaccttccgcggccgcggcggccacggttcgatgccggaggcctgcgtcgatgcggcggtggtcgcttccgctttcgtgatgaatctgcaggctattgtggcgcgagaaacctccccgctggagtccgcggtagtcaccatcggcaaaatggatgtcggcacgcgctttaacgtcattgccgaaaacgccgttcttgaaggtaccgtgcgctgcttcagcctggaagcgcgccagcgcctggaaacggccattacccgctatgccgagcataccgccgcggtatatggggcgaccgctcaggttgactactgctacggtacgctaccggtgatcaacgaagagcgcagcgcgctgctggcgcagtcggttatccgcgacgcgttcggcgatggcgtccttttcaatgaaaaaccgaccaccggcggagaagattttagtttttatatgcaaaatatccccggcgcctttgcgctgctcggctcgggcaataaagagaaaggcagcgactacgcgcaccatcacggctgctttaatatcgacgagcaggtgatgaaaagcggcgctgaactgtacgcgcagtacgcctggcgctacctgcagcaaaacgcgttttaagccaatcctcccccgacgccgctcgggggaatatcacattcccgccgcctctccttgaaaatgccttgtcgatatcgcaaaaaacaacaacaatcactctattgttgatgacacggaggcactcatgtctacctcgttttttgtcgctgccgactggctggcagagcatattgatgacccggaaatccagattatcgacgcgcggatggcccctccgggacaagaagagcgcgatcttaacgctgagtatcaggcaggccatattcccggcgccgtctttttcgatatcgaagccctctctgaccacaccagcccgctgccgcacatgatgccgcgcgcggaggcgtttgccgtcgccatgcgcgaacttggcgtcagcagcgataagcatctggtggtatacgatgaaggcaatctcttctccgcgccgcgcgcctggtggatgctgcgcacgttcggcgttgaaaaggtgtcgattgtcgccggtgggctggagggctggcgccgcgatgggctaccgctggagcagggcctccccgaactgccggaaggtgattttgacggccgcgtcgatccgctggcgatcaagcgcttgacggatgtgctgctggtcagccacgaaggatcggcgcagatcgtcgatgcgcgccctgcaggacgctttaatggccaggtggcagagccgcgaccgggactgcgcagcgggcatattcccggcgcgctaaacgtaccgtggacggaactggtgattaacggcgaactcaaaaccaccgatgaactcaacgagatcttcgcgcgtcagggcgtcgattttgaacggccgattattgccagctgcggctccggcgtaacggcggcggtcgtcgtgctggcgctcaccaccctcggcgttaacggcgttagcctgtacgacggctcatggagcgaatggggggcgcggacggatttgccgattgaaccggcgcagtaggcagtaaagagaacaacgggggcctgagcccccgttgagttaaataatccgattgtgcttaaagtcgcgcaggaagctgccccagcgcttttcataaaacggcgtgatgtgggcgatcataaagtggctaatccccttttccccctccaccacctgacagatatcaatcggctcgtcgccgggaagcgtatcggtcgccacgctgccggtcgcctgaataacctcctcaatatcgccttccgcttcaataccaatcagcaggttggctggcgcatcggcgctgtctttgatagagcataaaaacgcgcgcttcaccgttttcagggtcttaaacagcgtggtcagcgagtccaccatctgcgcgggcggctcggcaacctcagacagcagcagcgactctccgccttcaagcacggtctgggtgctgagcgggctgccctcttcccccagcagatggctaatctcacgcggcgcaaactctttgccggtggcgagtttggcattgagatagagcgtttcgccgagggtcatggcgaacagcgtgcgcaccggcatcaccacaaaagactgttcgtcctcaacggcctgctgcagcgcttccagcgaggtgaaaaaaggaatgaccgatgtgccatcatctttttcccagtgctgcagatccagcacgctgtcttcaacgacctgctcgccctgagcggcggctccgggtacccacacggtagcttccagcagcgtacggaaaaacgccggacgatggcctggctcggtagccgccttctccagcagggtttctagctcatttttagtttcggacatagtagttccacaacgaaaatcccctcaccccggctctctccacgaaggaagcgggagaaagccgaacgtgacctccccctgaaacatcagggggagggtcaggggaaagggttattccgcggtcagcaaattagcaatagtgcgcacgccgaggccggtcgcgcccgccgaccactgctcaaccgcagatttgcggtaggtcgccgagcagtcgatatgcagccagccttcatgataattctccacgaagtgggacagaaagcccgccgcggtgctggcgccggccggataggccgcgctgccggtattgttcagttcagcaaagttggacggcagctggccgcggtggaactcagccagcggcaggcgccagaaagcttcgttttcagcctgcgcgctcgccagcaggcgattcgccagcgcatcatcaaagctgaacagcgcgtgataatcattgccaagcgcggttttcgccgcgccggtcagcgtggcggcatcgatgatcagcgccggcttttgcgccgaagcatcgatcaggccgtccgccagcaccaggcgaccttccgcatcggtgttcatgatttccacggttttgccgttgcgatagtgaataatatcgcccagtttgaaggcgttaccgctaatcaggttatcggcgcagcacagatacagcttcacgcgcttgttcaggccgcgcgtgatggcgaacgccagcgcgccggttaccgtcgccgcgccgcccatatcggacttcatcgagtccataaacgcgctctgcttgatgctgtatccgccggagtcaaaggtgatgcctttaccgaccaggcaggcgtacaccggggcttctttgtcgccggttgggttatagtccagcgccagcaggaccggcggacgctcggagccgcggccgacggtgtggaggcccaggtagttctgctcgcgcagatcttcgcccttggtgatgcgataagagacgttatcgcaggccacgctgcacagcaggtctaccgcacgctgcgccagctgttccggccccagctcttccgccggggcgttgatggtgtcgcggacccagtcaataatggtcaggcggttatccagttcgcttttctgcgcatcgtcgagggccggccactccactttgcggctgcctttcgggcctttatagccggcccagaatgcccatgcgcgatcggtatcccagccctcgccgtcaagcgcgacatgtttgatgcccatgccgtcaatttttcgcgccgcgcgctgaatcaaaccgaggtcgtctttgccgttcagatgcagggcgatgccgtcgttattaatgctgtaagatgctttttctccccagcgcgcatcggctggctgagcggtaagcgtaattttcatagcttcggtcattatcattatccttcttagcaaacgggccgccgtatggcagcccgtaaagttctttcgctcgttgtttcatccggcttaaaaccaccgggtaaatcatgacgcgaaaattattctgcttcgtctaaccagactagcagaatcgcctcaagaattttttcattggatgcgttcggatcgtcatcaaactcttccagatcgcaaatccactgatgcagatcggtgaagcgaacggttttcgggtcgagatccgggaaagcgtcgtacagcgcttcgccgatttcacgactatcggtccatttcagtcccatattaatgctcgcgtgcgtggttgatggtgtaacgcggaatttcgatgaccaaatcttcgtcagtcacccgcgcctggcagctcagacggctgtcgggctcaagcccccaggccttatccagcatgtcgtcttcatcttcggtactttccgccagcgagtcaaagccttcacgcacgatgcagtggcaggtggtgcaggcacaggatttttcgcaggcgtgttctatctcaataccgctacgcagcgctgcatcaagaatggtctcaccggtctcagcttccacaactacgccatccggacacaggtcctggtggggcagaaaaacaatttttggcattttaaacctcgtccacggattggcctttcagcgcgatacggaccgattgatccatacgacgtgcggcaaattcctgggtttgtgtgtcgatatttttaatcgcttctttgattgcatcggcatcatcgcctgccgctgcggcgcgcacttgctccgcggcgtcatcgatagcctgacgctctgcggcgcttaacagcgcggcgtcggcggccagcgcgctgaccagactttccagtacgcgcgcggcttcaactttttgctcggccagcatacgcgcctggacatcctgttcggcgtagctcatcgaatctttaatcatgctggcgatctcgccatcggtcagaccgtaggacggtttcacctggatagaggcctcaatgccggtcgatttctccatcgccgtcacgctcagcaggccatcggcatccacctggaaggtcacgcgaatatgcgccccgcccgccggtaatgccggaatgccgcgcagcgcaaagcgcgccagggagcggcagtcctgcaccagctcgcgctcgccctgcataacgtggatagacatcgccgtctgaccatctttgaaggtagtgaactcctgggcgcgcgccaccggaatggtggtgttacgcgggataaccttttccaccaggccacccatggtttccagccccagagagagcggaatgacatcaagcagcagcagttcgctgtccggcttattgcctaccaggatatccgcctgaatcgccgcgccgatggcgacgactttatccgggtcgatagaggtcagcggcgtacggccaaagaattcgccgacgcgttcgcgcaccagcggcacgcgggtcgagccgcccaccatcaccacttccagcacctcttgcgcctcaacgccggcgtctttcaacgcgcgacggcaggccagcaaggtgcgtttgaccagcggggcgatcagcgcattaaactggctacgggtcacctccccctgccagccgccgacgttcacccgcgccgtctcggcatcgctgagggcgattttcgccgcgatcgccgcgtcaagcagctcgcgctgcaggcggttatcactgcgatcgctcaggccagcctgctcgcgcagataatcggccagcagatgatcgaaatcgtcgccgccgagcgcggaatcgccgccggtggccaggacttcaaacacgccgcggctcaagcgcagcacggagatatcaaaagtaccgccgccgagatcgtaaaccgcgatgaccccttcctgaccggagtccaggccgtaggctatcgccgccgcggtcggctcgttcagcagacgcagcacgtgcaggcccgccagacgcgccgcgtctttggttccctgacgctgagcatcatcgaagtaggccggcacggtaatcaccacgccgtcgagctcgcccgccagcgcctcggtggcgcgttcggccagcgcttttagaatgtcggcagatacgcggatcggattgagcaacccccccgtagtctgaatcatcggcaggccgttttcgctggcctgcagctgataaggcagatgtggatagcgggcctcgatatcggccagagagcggcccatcatgcgtttgacggagctgatggtgttgaccggatccagagcggcgttttgtcgcgcgtcatagcccaccgtcaaacccgaagcctgatagttcaccaccgacggcagcaaatagcgcccctgatggtcgggcagagtttcggcctggccgctacgcacggtagccaccagtgaattggtggtgcccaggtcgatacccgccgccagacgtcgctggtgcggcgcggcgctcagtccgggctcactaatttgtaataaggccataattgcttccgaaaattaaaaatcgagcagtttttcttcgagttgttccgcactgcttcgcagtttatcgagaaaacgcagcttgcgcacggtatccgccgccgcctcccacgtctcgttattcagttgttcaaccatcagctgatgccgggtatcaaattgcgctttgacccgcttgataaagctttccagccgcgcttcatctttcgccttgcctatctcatcgagctcttcgcgcagttccagctgttccatcaggaacgcggtatcgcgcacggtatgctgctcgctggcgagatcgaaaccgtgaagtgaaaggagatattcggcgcgggtcagcggatgacgaagggtttgccacgcctgattaatggtggcggactgctgcaccgcggcgagctgttcagccgcgctgccgctggcgaacttatcgggatgatactggcgctgtagctcctggtaccgggcagccaggggttctaacgaaagggtatagctggccggtaacccgaagagggtaaaatagtccatagcaacctcagggttaacgagataaagcaaaccccacgcgcagcgagactacggtggggtcagggataaccgattacacgttaaagctttcgccgcagccgcactcgtctttcacgttcgggttggtgaacttaaacccttcgttaagaccttctttgacgaagtccagctgcgtgccgtcgaggaactgcaaacttttgccgtcgatcacgaccttcacgcctttgtcttcaaacacggtgtcttctgccgccggctcgtcaacaaactccagtacataagccatacccgagcagccggaagttctgactcccaggcgcagaccaaaccctttaccgcggttggccagaaaggtgttgactcgcgctgctgcactgtcgcttaaagtaatcgacataacaaacctcaactcttaattattttgcttcacgtttgcttttgtaatccgcaatcgcggctttaatcgcgtcttccgccagaatagagcagtgaattttcaccggcggcagctcaagctcgtctgcgatatcggtgtttttgatcgcctgagcttcgtccagcgatttccctttcacccactcggtcaccagggagctggaagcaatagcggaaccgcagccgtaggtcttgaaacgcgcgtcttcaatgataccttcattgttgactttaatctgcaacttcatcacgtcgccgcacgccggtgcgccaaccatgccgctgccgacgttttcgtcgctattgtcgaaggagccgacattgcgcggattctcgtaatgatcgataactttttcgctgtaagccatgatgaattctccttattggtgccgaattagtgatgtgaccattcaatgctgttcagatccacgccctgcttgaacatttcccacagcggagaaagttcgcgcagacgaccaatggagttgcgaaccagattgatggtgtagtcaatctcttcttcggtagtaaaacgacctaaagagaaacgaatagagctatgcgccagctcgtcggtcatccccagcgcgcgcagcacgtaggacggctcgaggcttgcggaagtacaggcggaaccggaagagaccgccaggtctttcagcgccataatcagcgactcgccttcaacgtagttaaagctgacgttgagaatgttcggcgcgccctgctcgagatcgccgttcaggtagacctcttccatatcttttacgccgtcccacagacggttacgcaggccgcgcaggcgggccatttcgctttccatctcttctttcgcgatacggtaagcttcacccataccgacgatctggtggacaggcagcgtcccggagcgcatgccgcgctcgtgaccgccgccgtgcatctgcgcttcgatacgaatacgcggtttacgacgcacatacagcgcgccgatgcctttcgggccatagattttgtggccggagaaggacatcagatcaactttcagctggctcaggtcgataggcagtttgcccacgctctgggtcgcgtcaacgtggtaaatgataccgcgggcgcggcacatctcgccgatggtagcgatatcctgcaccacgccgatttcgttattcacgtgcataatggaaacaaggatggtgtcatcacgcatcgcggcttccagctcttttaaatcgataatgccgttacgctgcggggcgaggtaggtcacttcaaacccttcgcgctccagctgacggcaggtgtccagcacggctttatgttcggttttgctggtgatgatgtgcttgccttttttctgataaaagttggctgcacctttaatcgccaggttgtcggattccgtcgcgccggaagtaaaaacgatttcgcgcgggtcagcgccgaccagctcggcaatctgattacgggcgatatctaccgcctcttcagcctgccagccaaaacggtgtgaacgcgaggccgggttaccaaaggtcccgtccagggtcaggaactgcatcattttctcggcaacacgcgggtccaccggcgtggttgcggagtaatcgagatagatcggtaatttcattgctctataaactccgtacatcgcttcaatgcaaggaatcaggcaaccggctggatgtacgaccgagtacacaggatgtcggaacatcctggcctgattcgaaaatcttttttatcttttttactcagctcgtttcagcttgcagccgatagctgcaagatgaaactgaacgagaactacgcgcgcagtttgacgtcgatggcgtcctgagcgcgggtgctacgctgggattcatggttgtgctgacggccagagacatcaaggatttcctggttattcaccagttcgcccagcgtgatgttattcagaaaaccggtcagtcgctcgctcagatcgcgccacagcgcgtgagtcagacacttatcgccgccctggcagccgcctttaccctgacaacgggtggcgtcaacggattcgtccactgcgctgataacttcgccaaccgcgatgctacccgcttctttacctaacagataaccgccgcctggaccacgtacgctggaaaccaggccatttttgcgcaggcgagagaacagctgttccagataggaaagcgaaattccctgacgctctgaaatatcagccaacggaaccggacccgattcagagttgagcgcaacgtcaagcatcgcggtcacggcataacgccctttagatgtcagtctcatgtcttacttaacctcaaactcgcccctgcccgggctttttattaatatgggtattgcatagcaagggcaagtctgacattcccgagtaaattggtcaactatttacttgactgttttagtcaggtatttggctttccgtgccgtttcacttcagcgcggcctggtgccctcgccccggccctctcccacaaggagagagggagcccgcagtaccgcgccgccgggcaacggcgtgcactatgacgctttatttttctgctgctgctcaattgacgccagcatgccgcgcaggatgttcagctcctggctttccgggcgggcgcgggtaaacaaacggcgcagtttgttcatcacctggcccgggtggctggcgcggataaacccggttgccagcagcgtctgctccagatgaccgtagaaacgctctaaatcatccaccagcggatacggggtttcttcatgctcgatgacaggttcattttgctcctgcgccgccagccaggccatacgcacttcataggagataacctgcaccgccatcgccaggttcagcgagctgtattccggattcgcggcaatcgccacgtggtagtgacacttctgcagctcttcgttagtcaggccgacgcgttcgcggccaaataccagcgcgatcggcgcatgctgcgcttcggcaacgcttttcaggccgcattcacgcgggtcgagcatcggccacggcagcgtacgggagcgcgcgctggtccccacgacgaggctacagcccgccagcgcttcatcaagggtatcaacgatgtgggcattgccaatgacgtcgctggccccggccgccagagcgatggcctgagaatcgggtttgaccagaggattgaccagccacaggttggttaaccccatggttttcattgcgcgggcgacggagcccatattgccggtgtgtgaggtttctaccagtacgattcgaatattttgcagcattatggttcttcggctaaagattattcgtgcatgctatcataaaacgaagacataaggagatttcactgttactatatgcgccgttttttcccgttctttaacatccagtgagagataccgatgcatccgatgctgaacatcgccgtgcgcgcagcgcgcaaggcgggtaatttaattgccaagcactacgaaacccctgactccgtagaaaccagccagaaaggcagcaatgattttgtgaccaacgtcgataaagccgccgaggcgatgattatcgaaaccattcgcaaatcttacccgcagcacaccatcatcaccgaagaaagcggtgagcacgctggtgaagatcaggatgttcaatgggttatcgatccactggatggcaccaccaacttcgtcaaacgtctgccgcacttctccgtctccatcgccgtacgcattaaaggccgtactgaagtggccgtggtttacgatccgatgcgtaacgaactgttcaccgcgacccgcggtcagggcgcgcagctgaacggctaccgcctgcgcggcagcagcgctcgcgacctggatggcacaatcatcgccaccggcttcccgttcaaagcaaaacagcacgcgacctcttacatgaacatcctcggcaacatgttcaccgaatgcgcggatttccgccgcaccggttccgcggccctggatctggcctacgttgccgctggccgggttgacggttactttgaaatcgcgctgaaaccgtgggatttcgcggcaggcgagctgatcgcccgtgaagcaggcgctatcgtctgcgactttaccggcggccataactacctgctgaccggcaacatcgttgcaggtaacccgcgcgtcgtgaaagcgatgctggccaatatgcgcgagcatctgagtgaagcgctgaagcgctgaagcgttaatttctcaccgcatgaaaagtaaaagaccaccttctgagaaggtggcttttgagaatgccccctgtaaggggggctattgtcaccttccgctgattactctagcaattccatctgctgttcatacgtttgttccgttttctcctgatgcctcacatatcgtctgataatttcttcattcactcccaccgtatcgacaaagtagcctcgcgaccaaaaatgattcccccatagcttcttcctgatatgtggaaaacggttataaagcctgatggcactgcgtccttttagatggcccatcagagttgatatcgagatctttggtggaatgatgacgaccagatgtacatgatcgggctgaacatttagctccagaacctcacaatcctttattccacagaggatatagatcgtcctgtacagctccttacccagcttatctttcaggatcctgaatcggtacttgggtgtccagactatgtggtatttgcaacgccaatatacatgtgatgaactcctgtaaagtcccatgtcggtttgtctccttttacttgtggtgagtaagcagagatattccgacatgggcattcttcaggctatagccttacaggagcaatcaccacctccctaggaggtggtttagggatgacaaccaaaaggaagccgcggcttccttttttatcgcattaaaacggcctcaggccgccgcccgatggcatcgcgctactccacatcacgatggccgccgccagtaaaatcacgccgccggccagcgccagcgttgcccaaccgatctgcttccacagcgccggcgcccgattcgcgctcagcctgaccgccagctggcggaaaccatgaaccagcagcgccagcgcgctaatcgtcagcgaggttcccgccgccatcgccatcgcggccgccatgccccagccaaatacgccgataaccttgctgaacaacagcaccataatggctcccgagcagggccgcatccccattgacagcacgatagccagccgcgcccgccagtcatcgccgctttgcagctgttccggcgccggcagatgctggtgcccgcagccgcagctggcgtgatgaacgtgatgcgcggtgaaggcgatgaatgtcggtcggcgcagcagcatccgcagctttttcagcgcccgccaacacagcaaaaggcccagcgcgccgaccagcagatagcttcccttttccagccagaagctgctcagatgcagctgtcttgccggcagccgcagcagcgtcagcaccaccaccactaaggcgatggccaccagcccctgcagcagcgaagcggccagcgtcaggccgatgctcgatttcagcttcgacggatgggttgccagccaggtggttatgaccaccttgccgtgccccggccccagcgcatgcagaacgccgtagacgaagctaaaccccagcagcgacagcccggcggaggcaggattctccgcaaccgcctgcagaagccgactcagttcgacattcagcgcgcgctgccagaccgcgctttgcagcagcacctgcggccaggcccgccatagccagaagccagctccggctgccagcagcagaaacagcgccagcggccacagctgacgccagcgcggcgaacggccggtttgagcaaaaatcactgacattgcagcgtcaccttttgcgcgaagtaattccccagttccatatcctccggcggcgcatccgctttatccagcgactgcgcgtaggacaacattttttcgttaggcttcggcgtcatcacttttgccgagcagcttgtcttcatcgccgtcggtagagtgaagtctgcgtctttgtcgtaatacatatcaacataataggtcgggtcgtaggtggaaaaggtgaaggtttgcccggccagaggctgcggcttcgccagcggcagggtaaaggtgagcaccgcctgatgaccgctgcgttcaaggccataaccagcgggccgattatcaaacttcacccgctggccgttgtgccatagctcgctgaaatagtgctggcccagcacgttcgccatcacttccgccgccagctttttccagatttcgctaccgggtttagcgttgcccgcatcatagagcagatcggcggaggtgatttcatccatcgtccagcgcattttaaagccggtgagcagcccattttccgccacggcctccgtttgcaaactgatgaaactgtgcggatgcgccgccgcagatagcgataaaaacatgaaaaacgctacgctgacgcattgtttcactctcttcatctgttcctcgcgtgaaaaattctgtgaaccccgccagcaatcctgatgtaaagacccggaaatgccctgttcaccctcaatacattaactactcttaacgaaaaccctaactggaactaaccggatgatgacagtgattgaaccaccatctgtgctttccagtccacagcgccgtagccaggtgctcctgatgttttatctgcccgggcagtccgtgacgcccgaatggctgggtaacctcacccaggttgatgaggataccgcccggcaggacattgcggagacgggacgcgagattcagcgttatcaccgcttgacccttgcttcacaagcggacggcagctatcggatggaaggcgccgcgctcgatcaacgtttatgcctgctgcacggcctgcgccgcgggctgcgcctgtgcccgcattttgtcagccaccattttaccccggcattgaaaacgcagcttaaacagcagggtatcgcacgcacgctgtatgacgacaccaatcttcaggcattggtcaaccgctgctcgcgcgccctgaaccggcagtttgactgccgcgacgtgcattttctgcgtctttatttacagtattgtttgctgcagcaccaccttggacagagccccactttcacccacgagcagcagcgctgggcgcaagccgccgccgagttttccctcgccgaggagattgtccgccactggcagcggcgggttgcggcaacgccccatgccggagaacagctgtttctggccctgctgtttatgctgttgaaaacccccgatcctatccgcgatggtcatcagcacgatcgccgtctgcatctggccatttccgggctgattcaccgctttcagaacctggcgggccgtccgtttagcgatgaacaggggctgagcgatcagctctatattcacctttcgcaggcgctacaccgcagcgttttcgctatcggtatcgataacgcgctgccggaggagattggccgtctttatccccgtttgatgcgcacaacgcaggctgcgctggcggagtttgaagccagctggcaggtacgctttagccaggaggaagtcagtttaatcgcggtgatcttcggcgcctggctgatgcaaaaaagcgatctgcaggagaaacaggtggttctgctgaccgatgataacccggaccttgagcagtcgctggagcagcagctgcgcgagttaaccctgctgccgctcaatataaagtatttgagcgtgagcacctttcagaaagagggcgcgccgaaggaagtgacgctgatcgtcactccctatgccacggcgctgccgctgttttcgccgccgctgtttcacgccgaagagacgttcagcgatcatcagcagcagcagatttgcaaaatgctggaggcctaagccaccgcttttggccgcaccaccagcgccggtaaggccaccagcgccatcacccagaaaacgccctggtgcagatgctggtagaggaaaccggcaaagaccgtcatcaccgcaatgctgccgcccatcgcgacggcggagtagaccgcctgcaggcggatcacttcgctgccctgacgcgccgcaatgtagcgcatcgccgccagatggcacaccgtgaaagtgccgcagtggaggatctgcgcgacgataagccagggtagcgccgtcgtccagcccatcaacgaccagcgaatcagcccgcacaccgcggacagcagcagcaggtcgcgggcgctaaagcgacggaaaacttttttgctcagcgcgaaaatcaccacttccgccacgacgccaagcgaccacaggtagcccaccgcggaggcggaataccccgcttcctgccagtagatagcgctaaatccgtagtaggcggcgtgcgcgccctgcagcaaacagacgcaggcgaggaagcgccagctttgccgcaccagcgtaagccaggccgccaggccggccgcttcctgctggcgggattcgccctgcggctgcaccgacggcttcagcagcatgccgagtagcatggaggcaataccgacgctgagcatcaccagtatcatccggtagtcatacaggctgaccagcttcccggtcagcgccgagccaatgacgaaagctatcgacccccacaggcgcacgcgcccgtagtccatggtgatctgcttttgccaggtattcgccagcgcgtcggtcagcggcaccagcggcgagaaaaagaggttaaagccgacgataatcaccatcagccaggcaacctggtggccgatccaaaatgcgagcgcaaagagcagcgtcagcagcgccagaatgcgcagagaagagataagacgggacgggtcgctgacccgcggcgcaatcagcaggctgccaagaaagcgcgacaccagcccggcgccgagcagcatgccgatggtttccggcgtcaggccaagtccggaaagccagacgctccagaaaggcaggaagatgccatagctaaaaaaataggtgaagtaacttagcgccagccagcgcgtggagtgtaagaccatgattccctcccgaatggaggcgacagtctggcgataaagcggggcgggcgcaagataccctcgccccagatatggcgctattcgcgcccctgtacgtctattttcagcgaaaaactcagcgtatctccggcgcctaaaacccgcagccccggctgtccgtccatgttatgggcgtttaccggatgactttgcggctcgaggcaaaggaacggctcgccctgcattctgaaaagcatcaaccacggagtttgcgaaagaattgtgatatccatcacatcactactcaccctcgcccgcccgctccagccggaatagcccacgttcagccagcgatcctcaccgtactgcgcgtggctgaaatcggcgtagccgggcaactggccttgccagccgagaggaagatgctgctccccttccggccagtagccggcggctgcaaactgcaccgtaccgcgcttatcaaaaggaaaaaacggatgaaaaccgcagccataggggatgggcgtgctaccgcagtgggtaagcgtcagcgcagccaccagctggttacgcagcagctggtagcggatctgcgccaggtaatcgaaaccgcaggcatgctgccgacgcagctgtaacacgcaatagtcgccgccgcgcgcaatcatatcccagcgctgcagccaaccgtcgccgtggagaaaaaaatgcgcgtcggcgtggtggcgaggcagaactatctcacgtccctgaaaaataaagcggttcccggcgacgcgattggccagcggcagcatcggaaacatgccgccggcggggttttcatacagcaccggcgcctgataatgccgcgagtataaactttgcactttgccgcccagagaagcgacgcgcatccgcagatgcgcgttttccagaatccactcttccgccattagcgcgtctgctcctgcttcatcgcctgagcgcccgcatgacgttgcgccagctgctcttccagggcttcgagagtgacccccttcgtttccggcacgttgcgcagaatatagaggtagccggcagcgcaaatgacgccatacagcaggaaactgcccgccgcgcccagtccggcattaagcagcgggaaagtgtaggttaacaagaaacaggcaatccacagcgccagggtgcctaaggacatcgcgagtccgcgaacgcggttggggaagatttccgccagcagtacccaggtaaccggcgccagggtcaaggcgtaaatagcaatcgccgccagcaccagcagcagaacgggccagcccatgatgcccatgccataggcggcggcaatcagaacatagatcagcgtcaaccctgaggcaccgagcagcattaatttacggcggccgattttatccaccagcggcagcgcggcgagggtaaacaccaggttgacgatccccgttgcgacgatcgatttcagcgtgctgttaatatcgaatcccgccgaggcaaaaatctcctgcgcgtagttaaagatgacgttaattccgcaccactgctggaagacggcgaggaccataccaatgataacgatcggtttaacctgcggagccagcagcgcgccgtaggatattttatggttatctttttccagcgtgtgcgcgatgtcgcgtaatatcctgtcggcatagtcggcggagccaatgcgctccagcgcggcccgggcgcgatccggcttaccggccttcatgagccagcgcggcgactcaggaacaaaaaacatcagcaccagaaacgccagcgccggcaccagttccgcgccgaacatccagcgccagcccatctgcccgttccaggtctccacaatcatctgctgcgtcgctcccgtcgccacgggttccgcaatcatcaggttgataagctgagcggccagcacgccaaccacgatagtgagctggtttatcgcaacaaagcgccctcttttttctgccgggctgacttccgcgatgtaaagcgggctgagcgcggatgccagaccaatccccaccccgcccacaatgcggtaaaccacaaacatgtcgaaactgctggcgaccgccgtcccccacgccgaagcgctgaacagcacggcggacagtattaagggcagcttgcgccccagtttatcggcgcaccatcccgagattaatgcgccgaaaacgcagcccaccagcgccgagctcattgcccagccggactgcgccgggtcggtaatggaaaaccaggcttcataaaacggctttgcgccgccaatcaccacccagtcatagccaaagagtaaaccaccgcaggcggcgaccagacagatagtccagacgtagcccattttcagatgtgtctgcgcgttattcataatgattcctctataagggaaacgcagggaacagtagggttcaggcgggccaggcccgcccgtttcaggttcaggaaaacatgccgctttgcagggcatgacgaatcagatgcgccttatcatgagccgggttcagctgcagcagccgctgcatcgcctgctggctggcggatacgttgcccagccccagatggcccagcgcttcaataaacaaacagtgctgctgatgctgctgctgcgcagaaacatcgagcaccaccagatccgggagagagacggcaaaaaagtcggcttgcggaacgtcatcccgatgctgcctggcccaggcgataaaattctggaagtgctgctcggcctgcgccggattaccgctcttacgcagcgcgatgccctgccagaaaaggtaatcggcgggctgatcgttgtagtaacgcccggcgtccagcgttgagcccccttgcagggcaagctggtaatattccgctgcccggtgcgcatccccagtctgttccgcgcaatagcccagcaaataccagatatcgttgtccgtctgcccgggcagccgcccctctcccagattatcgggatagcgtaacgcttcattcaggcagcgagcggcctgcgtgaacgccttacgttcgatcaactgtaaagcgcgatggagctgattgagcaaatactggccggtaactttcccctccccgccttcccagggatgaaatacgcgcgtaccgagaatagcggcggcatcggcgtaatggccggccgcgttccacaggcttaacagctcagcggtcaggtcatcccgcttcagcaccaccgctttgcgcgccgccagcgtttccagtcgttcgtttaccggcgtacccagtgattttttcaggaaatcaagctcaaagaggaagcgcgcgttttcgggctcaagctctacggcccgctgcagataagccagcgcctgcgcggcatcctgttgtttgttccaggcgtagacccccagcagacgatgagcgggcgcatagtcgggagatttttccagcgtctcgcgccagcagcttaccgcctcttcatagcgacgtttgctgtaccagaagcaaccgagcagatagcgggcaaaagcgctatcgctcagggtttgcagcatctggacttcatcgagcgtgttggggaaacgcacttttcgcacatggcagcgctcggcttcggcaattaaccgttgccgtttattcgcatcatcgcttaacgaggcgcgccacagcatcggcagcgcttcctggcaatccagaacctcaagcacctccttcgccgcctgcttctgaccgatggagagcagccagcccgccagcaggctgccgttgatccctctgcgccccgttacgcgcagcaggctcgcgcgcgcctcatcgcccggcgcaatcatccagcgcgcgcagtgcagcggatagctcaacgggtattgttcgaggcagaggacaatatacgcctgcgcttccttcgcccgcccgctgtccgctaacgccagcgctttcagccccatagccagatggttgctggcgttaaactgcaggctggtgttgaccttttccagcgcgtcggcggtatcgccacgcttcatcgccagccttgccagcgcccaccaggcggcatcgcggcagttaccgctccaggatgctttgtaatagcaatcccatgctccagcttcatcgccctgcctttccagcgcgctgccaagcagcatactggcttcgccatcgcgcggatttttattcagacgatgggcgcgaagtagcgcggcccgggcacattgctccgccagcccccagtcggcgcaattaaacgccagcgtcccgagggcaacattattgcggtaatcctgcggatcgagggctatcgcccggcgatagtaatccgcggcatagcggcttgcatgattgtattgttcaagatgctggccgataaaatagagctcatcgccgttgtgaatctcttccggcatcgccggcgcgcaggcaggttcgggcaggggcgtctgcggagtaatatgttcctgataatccagcagcggctggttgtctgcggttttcaccttaatggttaagcgccgggcgtcattttccggcagcgtatgctgccagctctcgccgggcttcagcgtaagctgagtttcatacagcggctgcttttccgcgctgagttcaacaacaatattttccagcggcgcaatggcgtgaacgccgagctgcagctgctccgtctcacgaaccagcttcagcgccagctgcgtattggcattttgcaccattcccagctcgctgtagggaaggaagttttgcacaaacaccttctcttcataaggcgcaagccaggtaaagtcaggctggttatcggtgtagacgccggtcatcagctcgatataggggccattttcgtcggtcagattgcggtcccacgcctggccaaagtcgccatagccccagctccactgttttttgcccggcgagacgtgatggtcggcaacatgcagcagtccaccgcgctcgtcgtggtgataagcgccgacaaagtcgtagtccgatttctccgccatatacgaggtgggtaccggaacatttttataccgggagatatcgacacccgcagaatagtccactttgtagtaggtgccggtggcgatgggaaaagcggaaacatcgcgcttgccgtgatcgaatacggcggtgacgtcgggtggaaacacgctctggtgagcatcgccgcctttgaccgccgggttggcccaccacaggaaatgacgcggcgttgcgttaccattaaaaaccttaccggtaatttcaatcagcgcgcggtcaggatagagagtaaacccggtcatgacctgtaaaccgcgcatgggctccgcttcccccatccatacggtctgcacgccgttttccccgcgctggatcgaaaaatcgaccggcataaaggttgtcgggcggtgatgctgcggccagttgaactcgataccgccggagatccagggccccagtagccctaccagagcgggcttaacgacttcattgtaatagacgaaatcgcgctgtttgactttgtcatacgcccggtgaatacgtccgccgagctccggcagcagcatgatacgaatgaaatcattctccatccatactgcctgataatcgcgcatttcacgctcgccggtcagggtatctatcacgccgtagggatagacgttgccggaggaaccctgataaacgcgcttttccagaaacatggggttcggatcctccgcccccgtcgtccacgtaggtaatgtaattgtttcctgccagaccttaaccgaaccgtacatgacgcctccactaaacgaaataaagtaaaacatgcaatgagaggagtttatatcgccatttagctgctaaaatgcgcaacgctcacgcaatatagttaagggagttaagtgtatgcagcgcaccggtttgaataacgcccgggtcaggcaggccaacaaatcaatttttctctcccacctctggcgggagaaacagctcagtaaatcccagctttcccagctcaccgggctctctattccggcggtgagcaacattcttgccgaactgcttagcgagggattgatcggccattccacggaaaaaatgagcaagcgcggcgtgaacagcggaagctaccagatccccgaacacggtgcctggacgctatgcatgaatatcacgccgaccagcattgagtatcagcttgccgatgcccgactgctggcggttgacggtcaccagcatttgcccatcgatgcccccacgccgcaggcccttctggaggccatcgtggaatgctggcgacgtatacaccgccgctacccgcagcacagcatcaatctcgcgcttggcgttcatgggcaggttgatccggtaaccggggtgtcacaaaccatgccccaggcgcgctggaaaacgccgattgaaataaagtatctgctggaggaacagctcggcgtgcaggtgcgggtggataatgactgcgtgatgctggcgctggcggagaagtggcagcatcagggtatacagccggatttttgcgtgattaacgtcgattacggtatcggctcgtcatttgtgattaacgatcagatttatcgaggaagcctctacggcagcgggcagataggacacacgattgtgaatcctgacggcagggcctgcgactgcgggagatacggttgcctcgaaaccgtagcgtccctcagcgcgttgaaaaagcaggcgcggatgtggcttaaaacgcagccggaagcgcagcgctctcccgagcaattaaccacggcatcgctcattgaagcctgggaacagggagacgtgcatattcgcgcatgggttgatagcgcggccaacgccattggcttaagcctttataatttcttaaatattttgaatattaatcagatctggctatacggacgcagctgcgcctttggcgaacaatggctggaaagtatcgttaaacaaaccggctttaatccctttgaccacggcgatacgccgcgagcgcacgccactcaaatcggctttggcaaactgacccgcgcccagcagctgatggggatcggttatctgtacgtggaggaacagctgcaaacgctgcgttaatcgtcagcggacgtggcggagcgcaaatttgtgtattacgtttaaatcacacgtctctcataacgagctgattatgaacactctacgctactttgactttggctcctcccgctctctgctgctgctgattgcgcgtatcgcggtggtggtgctgtttattcttttcggctatcccaagctgctcggctttagcggcacggtgcagtacatggcctcctccggcgcgccgatgccaacgcttgcggccatcattgccattattatggaagtgccggcggccattttaattgtgctgggctttttcacccgcccgctggcggtgatctttattttttataccctcggtaccgcggtgattggccatcactactggaatatgaccggcgatgcggttctgccgaacatgattaacttctggaaaaacatcagtattgccggcgccttcctgctgctggcgataaccggtcccggggcgatttcgctcgaccgccgctaatcaacaaacgcaaaaaaggccgcatcagcggccttttttatgtcaacgctaacgcttacgcataaaccgggaagcgtgcgcagatatccagcactttacccttcacgcgctcaataaccgcttcgtcattgatgttgtccagcacgtcgcacatccagccggccagctctttcacttccgcttctttaaagccgcgacgggtgaccgccggagaaccgatacggatgccggaggtcacaaacgggctcttcggatcgttcggcacgctgtttttgttgacggtgatattagcacggcccagcgcagcgtcagcttctttaccggtcaggtttttatcgaccagatccagcagaaacaggtggttttcagtgccgccggaaaccactttgtagccgcggttcaggaacacttctaccattgccttcgcgtttttcgctacctgctgctggtaaactttgaactccggctccatcgcttctttcagcgcaacggctttcgccgcgataacgtgcatcagcgggccgccctgggcgctcgggaatacggcagagttcagttttttgtacagctcttcgctgccgcctttcgccaggatcaggccgccgcgcggaccggccagggtcttgtgagtagtggtggtcacgacgtgagcatgcggaaccgggttcgggtaaacgccagcggcgatcagaccggcaacgtgggccatgtcgacgaacaggtatgcgccgatgctgtcagcgatttcgcgcatttttgcccagtcaactacgccggaataagcggagaaaccaccgataatcatcttcggtttatgttcctgagcctgcttagccatgtcttcatagtcaattttaccggactcatcgatgccgtaaggaatgatgttgtacagtttgccggagaagttgaccggggagccgtgagtcaggtgaccaccctgcgccaggttcatacccagaacggtatcgcccggctgcagcagtgcagtatagaccgcgaagttagcctgggagccggagtgcggctgcacgttagcgtagtcagcgccgaacagctctttggcgcgatcgatagccagctgctctacgatatcgacgtattcacagccgccgtagtagcgcttgcccggatatccttcagcgtatttgttggtcagctgagagccctgcgcctgcataacgcgcgggctggtgtagttttcggaggcgatcagttcgatgtgctcttcctgacgtactttttcttgctccatagcctgccacagttcggcatcataatcggcaatgttcatttcacgctttaacatccgcatctcctgactcagctaacaataaaatttcggcctaaaaaggcggtccacctggacaacggcccacagtataactgaatcattctgcgataacaggtcttgacaaaggattttacgcaaacgattggctccgcgttacacaaggctttgagcaataaagcaccttcgattatcaacggatttcttttcaggtttgtgatgcaaataattcatgttgtaactgccttatgggaaagtgttaaagaaccatttacaaagcagggttatttttataagatgcattttaaatgcatcattaagataacctataaaggaagctgctatgctcgacgcacaaaccatcgctacggtgaaagccaccatccctctgctggttgaaaccggtccgaaactgaccgctcatttttacgaccgcatgtttgctcataatcccgaactcaaagaaatctttaatatgagtaatcagcgcaacggcgaccagcgcgaggcgctgttcaacgccattgccgcctatgccagcaatcttgagaacctgcccgccctgctgccggcggtggaaaaaatcgcccagaagcacaccagcttccagatccagcccgagcagtacaatattgtcggcacccacctgctggccacccttgacgagatgttcagcccgggtcaggaagtgctggatgcctggggcaaggcctacggcgtgctggccaacgtctttattaatcgtgaagcgcaaatctacagcgaaagcgccagcaaaaccggcggctgggaaggcacccgcgcgttccgcatcgtcaaaaaaacgccgcgcagcgcgctaattaccagctttgaatttgagccggtcgacggcggcgcggtagcggaatatcatccaggccagtatctggcggtctggctgaagccggaaggctttccgcatcaggaaattcgtcagtactctttgacccgcaaacccgacggcaaaggctatcgcattgcggttaagcgtgaaaacggcggccaggtttcaaactggctgcatgattctgcgaaagaaggcgacgtgatttatctggccgcgccggccggtgatttcttcctcaacgtggcgccggaaaccccggtcacgctgctctccggcggcgtcggtcagacgccgatgctggcgatgctggatgtgctggcaaaatcgcagcatccggcgcaggtgaactggttccatgcggcagagaacggcgacgtacacgccttcgcggacgaagttaaaacgctgggtgaaacgctgccgaagtttacttctcacgtctggtaccgcagcccgagcgaagcggaccgtcaatccggcgcgtttgacagcgaaggtttgatggatttatcggccctggccgacaagatcggcgacccgcagatgcagttctatctgtgcggcccggtggcgtttatgcagtttgccgcgaagcagctggtagatctgggcgtgagcagcgacaacattcattatgagtgcttcggcccgcataaggtgctgtaaaacgttatcgatgacaggccgggataccggcctgtggactctgttaagataacctaccctattttcgcgaccgactgtctgacgatcaggtcagcggtgaggcgcttaactcttttgcttcccttttctttgttctcaattctggaaataagcaactcagccgccgttaagcccagctgatatgcaggctgcttaatcaccgttaacggcgtcgggaagaagcttgcccaccgcggatcgtcgaacatcaaaaaagagatgtcatccggcaccgccagaccacatttataaatcgcagaaataactccttcaccaataaagtcatttgccgcaataatggctgaaggccgctttttcccggtcagattgttaataacttcactgctggtcctggcctgcagcttgcccgtatctttcaccagcaaaacttcgtgagcaatatctgattctgcttccgctattgcgctttgaaacccgttcaggcgttcatcaaatgtggtaatggctaaatcaccagtacagtagagaatatttttgtgcccctggctgataagatagttggtagcaagcttcatgctttcatagttgctaattagcacctgatcgctggaatcaagcccggacaggcggtcaacctcgacaatcggcagatgctccagcggtctaatgttatttattgactgatgtgtcggaacaataataagcccctgaagcatattactttttagcaggtcgataagctctttttcggtagtttcatcttctgaagaggtaccaaaaataacggtatagccattatcgatcgcaactttctgaatggcggtgatgatttcaccgtgaaataaattggtaatatcggatacgatcacgccaatggttttcgactcaccgctacgcagctttctggctattgcgttcacctcataccctacttcttgtgctgcaagtaacaccttctctcgggtttccttcgtcacgagccccgaatcgcgtaatgctctcgaaacagtagagttggataaattaagttttttagcgatatctgcgatgcttgccatattcttctcttaagacgatccgtcgttcttttcattcaatgactctatgaccaacgccaggtcactcacacattctggcacgccccttgagtcctgacatccaattaaactcttcagctattcaacaggttacttcacataaccattttctggcaattcctgtcgccgcgaactgtaaaagccgtcaaatgactgatgatcgctttctgtgatctctctctcttttcgatcgccatcccccaggctagaatccacaaaaaatgacaacgttgtcattttgcataaattaaaaattaatacatttaaaacaatcaattaatacacaaaattcaaatattaaaaaacataaaaagacaacgttatcatcaataaggagcactaaacatgttgaccatcccactgatcgaagccaccgcagaaagcctggccccttacgcaaaactcatcggtttaccagcaaacagatccccttctgtagatcgtaccgatatcacttactttcacgatatttgcgatgcaaatgacttcaccaatataccggtagccagcttcctgaaagcgaaaccgcacccttttgtgctgtccaatattgaacgtcacatgcagaccgaagaggccgtgatccccttaaccggtgagagcgtgattgttctcgggccagtgggtgagtttgatatcaataaactggttgctgtccatcttgatggttctttcgggatcatcatgcgccgcaacgcctggcattttgcaccgtttccattagatgaggaaaatgccacctatatgctgctatccggccgccacactcctgacgatattgaagtgctggatattgatacggtgattgtgccccaggtgaagaaggaggagcgctcaaatgcctcatgctaatccttcatgtctgctggcctgcgaaatcctctgggactgcgttgaagatcaccctcctcagcagggaggcgctacccttaatgtagcttatcatctgcaaagattaggttgcagaacgatcccggtatccagcgtcggtagcgacaggctcggcaatcagtcactcagcattattaaaaatgagtggtgctgcgatattagcgaaatcaaggtgcttaaagatgtgggaacgggcgttgttgatgtcaaaatcgacgctgcaggcgatgcaacttataacatccatacccctgcagcctgggattatattagcatcagccacagcgccaaaaatcttgcctgcagcgcctttgtttacgggtccgtggctttgcgcagcgcattcaaccagcgcgctttcgctgactttttacagatatatcaggggctaaagtgtttcgacgttaacctgcgcgaagggcaaaataatatccagattgtaggcaattttttacagcacgctgattttattaagttaaatgaaagtgaactggagcaggttgccgctcattttcatattaccagtgaaaatattgaagaacggatctttgccctgaccagcattattggtcacaagattatttgtatcacccgaggcgataaatctccggtgctttactgggaaggtaatatttaccacgggcaagtcatccgtgtagacgttaaaaatactatcggcgccggtgatgccttctttgcagccatgatcaacgcgttaattaaccctgacttcgaccccacgacagcgctatataaagcctcggcgttagggtcatgggtggcgacgaaagcaggcgcccagccggaatatgacaacaatataatggataaactttttaactaccaggcggtgctgtgatgaaaaaaacaggattgttcatttctcctgatggtaataatcaattcaagatcttctgcatcatctcgatgctgtttctggtccttggtttcagcaccggtatgatcgatatcctgaataaacattttcaaaatacgctcgagatcaccaaagcaaaatcggcgctaatccaatttgctaactatattagctattttttcgtcgctatcccggccgggatcctggcgcagcgctatggatataaatcggggattattataggcttagtgctgattatgtgcggtaccagtacgtttatgctcgcaacggtgcacggcgaatattttttctttcttattggtatttttattctcgccgccggactgacctttatcgaaaccatcgccaacccatacgtcattgtcctcgggaataaagacggcggtgcggcaaggctgaatatttcacagtctattgcgggtctcggcctgatctttggcccgctgatcggcggccattttgtcctctctgccacgggtgaggtgtctaaaaccaacgatggactcttcgtcccgtatctggggattttccttgcggtgacgctgattctgctggtcttcttcagaaccaaagtgcctgaggtgacgccggaagcagatgaaagaatcggcgcgaccgagaagcccttctggcagctaccgcattttgttttcgccgtcattgcccagttcttatacgttgccgggcaaacgggtatcttcagcttcttcatcaactacgttgtcgaacactcgccagccatgacgctcggtcttgccagcctgctgccatcaacatggacctttagcacggggagcttctaccaaattaccgaacgcggtgcgtcacaaatactggccttcggcggttttgggctctttatgattggtcgcctgaccggaggaatgctgctgagcaaaattaaaactcaggtggttctctccacctttgcgttaatcaactcagtgttgatggttattattatttattcagatggttatctggcaacaatctctttagttctgagcttttattttatgtcgattatgttcccggctattttctctctgggtatcgcgggacttggcggacaaaccaaaaaagcctcatcgattattgtcatgtccatagttggcggagccgtaatgcccatacttatgggcgctatcgccgaccattacgatatggcaacgggttttatcatgccgctaatctgctttgcgttcattctattttacgccttagcctggaccaaattatatcgtggacagaatagcgaaatcgcgcccagctattaattcagcgaaataaatttaattttaattaatcaggaataatactatgaaaatctatgttgatactgccgatctcaatgaaataaaactgctggaagaaaatctaccgctggccggtgtaaccatgaatccgagcatcaccgcgaaatccggcattgcgctatcggttcttattccgcaaattcgcgctatgctgggaaaagacaggatgatcttcgctcaggtcattgcctccgactgcgcgggcatggtggaagaagcttgtcggctgagtgcaatggatgaaaatatcgttattaaaattcccgtcacgtcggaaggtttgaaggccatcaaaaagctgaaatcccatcaggtcagaacgctgggaaccgccgtgtataccaccacccagggtttgctggctgcgctggccggtgcggaatttgttgccccctatttcaaccgcattgaggcgctgtccggcaacggtcttgagacagtcagcgccctggttaagatccttgctttgcatgccccccactgcaaagtgtttggtgccagctacaaaaacaatcagcagttcctcgactgcctgctggcgggctgcgaatgcatcacgctgcctaccgacctggcaaaaaaccttctgcaaaaccctgccgtcgatgccgctgtggcccagtttcagagtgactggcaatccgcttacggaagccttgccatcaaataatcaacgtataaatcaaggaaaagattatgagcgcaaaaattatccagtcaccgggtaaatatattcagggggcaggacttttaaattctgtcgctgcctatgtcaaacacctgaacgcgaaatttttagtgcttggcgatgcctttgttatgggattgacgcaggaaaagcttagcgccagctttaaagaggccaatatcacctgtcaattttctacctttagcggcgaatgctcccgcaataccatcgcggccattcaggcagaagccgaggagaatcagtgcacggcaattattggtattggcggcgggaaaaccatcgatgcggcaaaagcggtagcctggtacatgaacttgccgctggtcattatcccgacgattgcgtctaccgatgcgccttgcagctcctggtccgtgctctataccgatgacggcgagttcgacgcttatctcgacctgcctttcaacccaacgctggtgctggtcgatacgcagatcgttgccaacgctcccgtgcggctactggcggcaggtatcggtgatgcgctggcgacctggttcgaagcccgcgcctgcataaaaagctcggccgcgacgatggcaggcggacttcccaccgtcgccgcaaccggtatcgcccggctatgttatgaaacactgattgccgatgccagaaaagccatccttgccgtcgagcgccatgtggtgaccgaagccgttgagcgcattgtcgaagcgaacacctatctgagcggcgtaggttttgaaagcggcggcctggcggctgcccacgctatccacaacggctttaccgtactggaagagacgcattcgatgtatcacggtgaaaaagtggcattcggcacgctcacccagctgatgctggaaaatgcgccgactgaagaactcgataccgttatccagctgtgcatcgacgtcggcctgccggtgacgctcaggcagctaaacgtgacggatgatatcgaaaataaaatgcgcaaagtcgccgggctggcctgcgtggagggagaaacgatacacaatatgccgtttgcggtgactgaggagagggtttatgcagctttactcgccgccgatagctatggatccgcatttatcaatgcccaaaaaacagcacgataagccctaattcaaaaacatagtcagctgccccggtgacatcaggtaccggggctttttggatggcttaaatcgccgcgtcgtcttcttcgccggtgcggatacgaatcacgcgcgcgacatcgaaaacaaagatcttaccgtcgccgattttgccggtctgcgccgtacggataatggtatccacgcaggtatcgacgatatcatcggtgacaacgatttcgattttcactttcggcagaaaatcgaccatatactccgcgccgcgatacagctcggtatgccccttctggcggccaaaacctttcacttccgttaccgtcatcccggtgatgccgacttcggccagcgcttcacgcacgtcatccagtttgaagggtttaataatcgcatcaatctttttcatggtgttcctgttttagtcgcgtaaccggttgctaaccgtatcataacttgcgtcatcacgcggagctactctttaaagtcgttagcgtcgagctcgtggcgcgacagcagcttataaaattcggtgcggttgcgccccgccatccgcgccgcatgcgtgacgttgcctttagtgatttgcagcagcttgcgcaggtaattgagctcaaactgattccgcgcctcaacaaaggtcggcagcgcggtgttttccccttccagcgcctgctccaccagggcgtcgctaatgaccggcgaagaggttagcgccacgcactgctcaatcacgttcaccagctggcgcacgttgcccggccatttggcggccatcagccgcttcatcgcatccgtggagaatgcgcggacaaaaggtttatggcgatcggcagactggcgcagcagatggttcgccagcagcggaatatcttccgtacgctcagccagcggcgggattttcagattcaccacgttgagacgatagaacagatcttcacgaaattcgcctcgcgccatggccttcggcaggtcgcgatgggtcgcagaaataatccgcacatcaatatcgatatcgcgattgctgcccagcgggcgcactttacgctcctgcagaacgcgcagcagtttcacctgtagcgcaaccggcatatcgccaatttcatcaagaaacagggtcccgccttccgcggcctggaatagcccctcgcgattgctgactgcgccggtaaaagcgccgcgcgcgtggccgaacaattctgactccagcaactgttcgggaagcgcgccgcagttaatggcgacaaaaggtttatcacggcgcgggctggcgttatgaattgcctgggcgacaatctccttgccggtaccgctctggccgttaatcagcacgctgacgtccgactgcgccaccatcccggcctgctccagcagtcgctccatcagcgggctacgggtcacaatcgcctgacgccagcgctcgtcggtggttggcgcgctctgctccagcgcgtcatcaatcgctttataaagggcgtctttatccaccggcttggtgagaaagctaaacacgccctgctgggtcgcggcaacggcgtccggaatggaaccgtgcgcggtgagaatgatcaccggcatccccggctgaaccttctggatttcgctgaacagttggagtccgtccatctcgtccatccgcaggtcgctgaccaccagatcgaccttgtcgcggctcagcgtgcgcagcgcctccggcccgctctcggcggtcagtacgctatacccttcgctgaccagacgcatacccagcagtttcagcagccccggatcgtcgtccactaatagcagacgggcgggtttacggatcgtcatgaatcacctccgggactttatcgccgccgtgcccggcgtcagagctgaagttcccgccgggtttacggctggagagctgacgctcgatatcggtgagattctccagcttgcgggtcgtcagttcgagctgactgcgtagctcaatttcctgctgacgcagcgtctccagctccgcatcgcttgactgctgcaatttggcgtagcgggagcgctcctcaatcagctgaagctgccggccctgggcatcgcgccagagctgataaagcgggcgaacctgggcggcgatttgcgggctgaaggcatccagactggccaccagatcgcgacgttcgttgggcgtgattttggcatcggccagtaaaatgccgcgtttaaaggcatcctgccagctgtcggcatcgtgctgccgggcttcagcccgcgcctgtaccggagcaaggcggtccgcgcagtcaattccccgcagccagtaaagcgggtttttatcactggcctcgctttgcaggctccagatgtcggcgcactccaccgaaagaaaatcggcgacctggtgctgcggcagcgcggagagcgttttgccatccgcggcgtgtggtgatgtagaggcggaacatcccgccagcgccaggcaggacatgcctgacaacagccatcccctgaggggacggacaagtgcgaagaagtgggacatattcacccgatagttatacgttattttgtccagactcggcgacggggagcgtgatacgaaaacagattagccctgatttatcatcaaccaggctcagctcgccctgcatttgccgtacgcagtcgcgggcaatgctcagccccagaccgctgccttttaccgcccctttacgctggtggcttccctgataaaaaggctcaaaaatcatgtttctctctgcgggcgggatcggctcgccgtcgttaatgacgtcaatgcgcacctgctcgccgtgccgatagctatgaatgcgaatgttaccggattcagcaccatagtgcaccgcattggagtagagattatccaggacgctcaccagcagagcgggctccgcttcgcataaacgctcgctgagcaacagttcggtatgcatcattttagctcttgccggcaggctatgggcagaaaccacattttccaccagttcggccaggtttaccgtctcgcgcgcaatcgggccatcggcctgtttacggttgtaatccagcagctgctcgatcagcttttgcaggttgcggctgctgttatcgagaatttcaacgatctcctgctgctcgagcgtcagcggcccggccacccggtcggcaagcagctccgtcccttcgcgcatgctggccagcggcgttttcagctcatgggaaagatggcgcaggaactgatgacgctgggactccagccaggcaaggcgttcgctcagccagataatgcgtttaccgacggagcgcagctcgcgcggaccggtaaacagcgcggcgtcgtccagcgacttcccctcccccagtcggttgatcattctctcaatgcccttcaccgggccgataatcatgcgggtgaacagcagcaccagcgccaggctgagcaggaacagcaccagcgcctgccagccgaagaactgcccgcgctcggcgatttcctgctgcagctgctgcccgcgcgaatagaccaccgttcgggttgcctgcaccatgtcgctattggccgaggcaaacgcttccaggctggcggctgacttcgccgccggaccgctatttttacactgcagctcggccagatcgtcgagatcctgacgcagcgcctgccagattttctcatcgggcaggacgcccgcgtgagcatcaagcatttcgctgtagcgttggcgctgattctggtagacccgcgccagcgtcggatcgtccagcacgcagtactgacggtagctacgttccatctccagcgatgcgttaatcatcgcttcgctgcggcgggcgtcgataagggtagtacggttgatatgcgccgcctgcgcgctcagcgcgttgaggctttgccacgcctgccatgccagcaccagcagcggcagcaggatcagcacgaaggatagcgtgaccagctggcgcagcgaacgggggaaaagggagagtcgcttcacggatagggtctcaatcattagctcatgacgatgctaaccgaggacgcaataaacatctacgccggaaataataaagccaggctacaggagcctggctttattaagaaatgaggcggtgccttactcgacgtttcgcccgatgactgataaagcggagctgttatcaggagttggacggcaggcacctgtttgtgcgtcattcgaagtttatgtagcgcgtcccgaaggggctgacataagaaggtgaatgagccactggttataattatgcacgaactatgccacatctcaaaacattttattaacacaatgaaatataatacctttttactattcatgggcatgaatgatgatggtcggttttcgcgcaaagtgtcgctgattagcaacaccggatgaatggtttagcaatgctattataaatcaataagttaagtgtcaccttttgacgacaccgctatagcgcgtttgtcggcgatccccgacacctgctgtcgatacgcctcaccaataaaaaagccccctgcgcgggcaggaggcttaatgcgatttgtgagcggttttagcccagctgtttacgcgcgttgcggaaaatacgcatccacgggctgtcttcgccccagttttccggatgccaggagttcgacacggtgcggaacacgcgttccgggtgcggcatcatgatggtcgcgcgcccgctttcgctggtcaccgcggtgataccgttcggcgaaccgttcgggttagccggatagttttccgtcaccttaccagcgttgtcgacgaagcgcagcgccaccaggcctttactttccagctgcgccagatgcgcgccatcgcgaacttccacctgcccttcaccgtgggatacggcaatcggcatcattgaccccaccatcccctgcagcagcagagacgggctctgggtcacttcaaccaggctgaagcgggcttcaaagcggtcggactggttacgcacaaagcgcggccacagctcgctgcccgggataagttcgcgcaggttagacatcatctggcagccgttgcacacgcccagcgccagggtttgcggacgatggaagaaggtggcaaattcgtcgcgaacccgctcattgaacagaatcgatttcgcccagccctcacccgcgcctaaaacgtcaccgtaggagaagccgccgcaggccaccagcgcctggaagtcagcaagaccggtacgccccgccagcaggtcgctcatgtgcacgtcgatggcatcaaagcccgcgcgatggaacgccgcggccatttctacatgggagttcacgccctgctcgcgcagcaccgcaaccttcggacgcgcgccggtggcaatataaggcgcagcgatatcctcattgatatcgaaggagagcttcacgttaaggcccggatcggcatcgttggctttcgcctcgtgctcctggtcggcgcactccgggttatcgcgcagacgctgcatttgccaggtggtttctgcccaccacatgcgcagcgttgtgcggctttcgctgaataccggatgaccgtcggcctcgatgacaaagcgatcgcccgtcgtggcctggccaagatagtgaacgcaatccgccagaccatgagcggccagcagcgcttccaccgcctggcggtcggcggcacgaacctgaatcaccccgccaagctcctcgttaaacagcgcggccagacgatcctcgccgagcgcggcgatatcaaccttgacgccgcagtggccggtaaaggccatctcggccagcgtgaccagcaggccaccgtcagaccggtcgtgccacgccagcagcttaccttcggccaccagcgcctgcattgcgtcccagaagcctttcagctgtgcgacatcgcgcacgtcggcggtcacatcgccaagctgacgataaacctgcgccagcgcggtcgcgcccagcgcattgttccccttgcctaaatcaatcagcagcagggcgttgtcttcggtcgcgagctgtggggtgacggtacggcgtacgtcttccacgcgggcaaaggcggaaatcaccagcgacagcggagaggtcatctcgcgctgttcagtgccttcctgccagcgggttttcatcgacatagagtctttacccaccggaatggtcagtccgagggccggacagagctcttcgccaaccgcttttaccgcttcatataaaccggcgtcttcgcccgggtgaccggctgcggccatccagtttgccgacagcttcacgcgattgagcgcgccaatctgcgtcgccgcgatgttggtcagcgcctcgccgaccgccagacgggcggaagcggcaaagtccagcagcgccaccggcgcgcgttcgccaatggacatggcttcgccatagtagctgtcgagactggcggtggtcaccgcgcagttagccaccgggatctgccacggacccaccatctgatcgcgcgccaccataccggtgacggtacggtcgccgatggtgacgaggaaggttttctccgccacggtcggcaggtgcagcacgcgattcaccgcgtcggcaatagtgattccctggcgttccagactctgaccctgggctttgagcgtctgcacgtcgcgggtcattttcggcgttttgcccagcagcacgtcaagcggcaggtcgatcgggcgatcgtcaaagtgagtatcgtcgaggctcagatgcagcgcttcggtcgcttcgccaatcaccgcgtacggcgcgcgttcgcggcggcacagctcatcaaacagcggcagctgttccggcgcgaccgccagcacataacgttcctgcgattcgttacaccagatctccagcgggctcatacccggctcatcgctgaggatatcgcgcagctggaatttaccgccgcgtccgccgtcgctgaccagttcaggcatcgcgttcgacagaccgccggcgccgacgtcgtggataaacagaatcgggttagcgtcgcccagctgccagcagcggtcgataacttcctggcaacgacgttccatttccgggttgtcgcgctgtacggaggcgaaatcgagatcggcatcggactggccggaagccattgaagaggccgcgccgccgccaagaccgatgttcatcgccggaccgccgagaacaatcagcttcgcgccgacgacgatctcgcccttctgcacgtgttcgccgcgaatgttgccgataccgcccgccagcataatgggcttgtgataaccgcgcagctcttcgccgttgtggctgctcactttctcttcataggtacggaagtaaccgttgagcgccggacgaccaaattcgttgttaaacgccgcgccgcccagcgggccttcggtcatgatatccagcgcggtgacgatacgctccggcttaccgaaatcctcttcccacggctgctcaaaccccggaatacgcaggttggaaaccgagaagcccaccagacccgctttcggcttcgcgccgcgcccggtggcgccttcatcgcgaatttcgccgccggaaccggtcgccgcgcccggccacggagagatcgccgtcgggtggttatgggtttcgaccttcatcagaatatgcgcgtcttcctggtggaagtcgtagcggccggtttcgtggtcggcgaagtagcgccccacggctgaaccttccattaccgcggcgttgtctttataagcagacagcacgtagtccggggttttctcgaaggtgtttttgatcattttaaacagcgacttcggctgcttttcgccatcaatgacccagtcggcgttaaaaatcttgtgtcggcagtgctcggagttagcctgcgcgaacatatagagttcgatatcgttcgggttgcgacccagcttctggaaagcatcctgcagatagtcgatttcatcatccgccagcgccagccccagacggaggttggcgtcaatcagcgcctgacggcccaggcccagcagatcaacgctggtgaccggggttggctgatggtgggcgaagagtttttcaccctcttccagcgcgccaaagacgctttccatcatgcggtcatgcagttcggccgccacctgcgaccactgttcgtcattcaggctgctcgcttcgacgtaatacgccacgccgcgctccaggcgcaaaacctgtgacaggccgcagttatgggcgatgtcggtagctttagaagaccagggagagatggtgccgggacggggggtaacgagcagtagcttgccggtcggggtatggctgcttaagttcgggccatacttgagcaatcttgccaggctctcgcgatcgtcgccgctgagcggggcgctgaggtcggcaaaatgaacgtactcggcataaagggtgctgaccggaaggttggccgcctggaaacgtgccagcagtttattgatacggaatgccgacagtgcaggtgaaccacgcaaaatttccatcataagtctctcgtcttcgaagctttcatggtgagccaggggggaaacgggcgccattatagtgaatcctgcgccccgacgaaaccgtttgcgtagaaataaaatgattgccggggtttatcaattaatgtgactcatctcgcgaataagttgccaactggcgcattcttaagcaaaatgccgctcattccaggacaaccttttactttttctggtcataatctgctgaggaacgcgaagctgcagaagattaactatctgaaaaaactaaagattaattatctgctcatcggcattgtgaccctcctgctggcggctgccctgtggccgtctctcccgtggatgggaaaaccagaaaaccgcgtggcggggatcatggcgcgcggagaactgcgaatcagcaccattaattcgccgatgaccttcgcgaccatcaatgacaagacctacggttttgattatgagctggcgcagcagtttgccgactacctcggcgtcgagctcaaagtcaccgtcaggcagaatatcagccagctattcgacgacctcgatgaaggcaaagccgacatgctggcagccgggttggtctacaactccgagcgggtgaaaaactatcaggtcgggccgacctactattccgtttcgcaacagctggtgtatcgcaaaggcaacctgcgtccgcgcaccctggcaaacatcaccgccgcgcagctggccatcgctcccgggcacgtggcgattaacgatctccaggcattgaaaaagcaaaaatatcccgaccttgagtggcacgtggacgataagcgcggcacgacggcgctgatgcaggcggttatcgatggcaaactcgactataccgtcgctgattcggtcgccgtcagtctgttccagcgcgtccacccggagctggccgtcgccctcgatatcagcgacgaacagccggtcacctggtttagcgaaaaaggtgaggataattccctgccggcggcaatgctcgatttcttcaataacattaacgaagatggcaccctggcgaggctggaggagaaatacctcggccacggcaacgattttgactacgttgacacccgcaccttcctgcgcgccgtggagagcgtcctccctgacctgcagccgatgtttgaaaaatacgcccgacagatagactggcggctgctggcggctatctcatggcaggaatcgcactgggatccgcaggccacctctccgacgggcgttcgcgggataatgatgctgacccgcaatacggcgcaaagcctgggcctgaccgatcgtaccgacgccgagcaaagcctcgacggcggcatgcgttatttacaggacatgatgaataaagtgccggagtcggtcccacaggacgagcgcatctggtttgcgctggcggcttataatatgggctacgcgcacatgcttgacgcgatggcgctgaccaaaaagcagaaaggcaacccgaatagctgggccgatgtgaagcagcgtctgccgttgctaagccagaaaaactactacagccgactgaagtacggctttgcgcgcgggcacgaagcctacgcctacgtcgaaaatatccgcaaatatcatattagcctcgtgggctatctctctgaaaaagagaaaaaaagacgcgcagatggcggccttaggcgaacactatccggcagtcatgccggatgagctggataaagaagagcagtacaccaggtccttttttaactttcgcgccgaaacgctggtcgataacgcaaaattaaaaatccccggaatggggcattaatcctgcgcctgttggcccgctcgctttagcgcttttttctcttcccgccgccagcggaagaaatcgctcagcatgccggaacaggcctccgccataacaccttccgctatttctacccgatggttcatgcccggatgatgcagcacatcaatcagcgacccggcggcgccggttttcgcatccctggcgccaaacaccagtcgggaaatacggctgtgcaccattgccccggcgcacatcacgcagggctcgagagtaacgtacagcgttgcgtcaatcaggcgatagttttgcaacaccagcccgccctgacgcagcgccataatctcggcgtgcgcggtgggatcgtggcggccgatgggccgattccagccctcgccgatgacctgatgattatgcaccagcacggcgccgaccggcacctcgccctcttcccaggcgcgtttagccagcgtcagggcgtgacgcatccagtattcatcatttaattcatggtcagacaaagcgggcactcctgcagaaaagcggggcgcattatacatgggcgctatgtattacacactattctaactgctgaagatcgccctgcggcgttacccgccagcggtgctggcaaaaagagagcagcgggttgtcctgctcgctgtcgctgtagccgctatacaagcgcagcggtgcgccgatcttttgttccagctgcgtcactttttcattaccgagacagcgcagggttaatccccagccgccgtagcgtcgctccattcggctggcgatcagattcacccgcggcagccaggcggtatcaaaatagacctgttcaaccagcgactgcggcgaaccggtgatcagccagacgtcagcgtccgtgctggtcagataatgtttaagccgcgcctgaacaaccgggaatgccgtgacgtgctggcgaaaccagcgaacaaaattggcctccaggcgtttaagctgctgctcgctgcgtccgaaggttgatgcccagagcagcaggctcatcggccagcgcgcggcgcgaccgtataacatcagtccggccgcgataaccggcaataaaggaagcagcagcagcgcgttcagtggctgatggcgcagggcatagcgcaaaaagctgccgaacatatcctgctgatgcaaggttccatccagatcaaagaaaaccactctccgcgtgctgctattcaaaacccactcccctgaacgatcgcatgataaccaatagcttaacagccttacgtcgccaatagcgaaaacatacgctgctgttgaatccgtattaagaaaacgtctttgccgagaaatcttaggcacagaatttttaattcgcgataatcctcttataatcgaatacaaaattctttcagcgagggtgaagctgtcctccggagccgctatgaactgtttgacccgtattcgccagcgctatccgacgttggccgcaagcgataaaaaactggccgatttcattctggctcaaccggatcaaacccgccacctcagctcgcagcagctggcgggcgaagccggcgtcagccagtcaagcgtagtgaaatttgcgcagaagatggggttcaaaggcttcccggcgttaaagctggcgttgagcgaagcactggcaagcgcgccgactccgcaatccgtaccggtgcataaccagattcgcggtgacgatcccctgcgcctggttggcgaaaagctgattaaagataacgtcgcggccatgcacgcctcgctggacgtcaacaccgaagagaagctgctggaagccgtcacgctgttgcgccacgcccgtcgggtcatcattaccggcatcggcgcgtcgggcctggtggcgagaaactttagctggaagctgatgaaaatcggcattaacgcggtatcagaacaggatatgcacgccctgctggcgacggtacaggcgatgtctccggacgatctgctgctggccatctcctattccggtgaacgacgcgagatcaatatggcggccggtgaagcgctgcgggtaggaagccagatcctggcgatcaccggctttaaccccaacgcgcttcagcagcaggcaacgctgtgcctgtacaccattgcggaagagcaggccacgcgtagcgccgcgatctcctccaccagcgcgcaaatgatgttgaccgatctactgtttatggggctggtgcagcaggatcttgagcacgctccggagcggattcgccatagcgaagcgctggtgaaaaagctggtgtaaccccgagtgccctgcccgctgccaaaagcacactctctcttattggctcagaccgggctaaatttctccgctgcggatggtcgccccgcggtggaaaagagctggcccgggcgaaaaatgggcgtataatgcccgccctgtttgtgttgtttctgagaatttcctgatggcgctgttaatcaccaaaaaatgcatcaactgcgatatgtgcgagccggagtgcccaaatgaggcgatatccatgggtgatagcatttatgaaattaacagcgatcgctgcaccgaatgcgttggccactatgatacgccgacctgccagaaggtgtgcccgatcccaaataccattctgaaagatccggcccataacgaaaatgaagagcagctgtgggataagtttgtcctgctgcaccacgcggacaaactgtgatattgccggatggcggcgttaaccgacctctccggcctgtaacactctagctttcgataatcaccgtggcgcaggcatagtgacgctcgtcggccagcgtcacgtgaatgctgcttacgcccatacgctcggccagactcttcgcttcgccccacaatcgcagctttggcttacccagctcgtcgttgtaaacctcaaactgattaaacgccagcccattgcggatgccggtaccaagcgccttggccgccgcttctttaacggcaaaacgcttggccagaaaacggaccggctgctgatgctgttcccatatcgcccactcgctatcgctcaggacgcgacgcgccagacgatcgccgctgcgggcaattaccgcttcaatacgggcaatttctacaatatcagtacccagtccgagaatggccatcaggcgcgcgcttcctgcatcaaacgcttcatttccgccaccgcctctttcaggccgctcatcaccgcacggccaatgatcgcgtggccgatgttcagctcgtgcatttccggcagcgcggcaatggccttcacgttatggtaggtcaaaccgtgaccggcattaaccttcagccccaggctggcggcataggtcgccgctttggcaatacgctccagctcttttgcctgctcagcgtcagtttgcgcatcagcgtagcatccggtgtgaatttcgatataaggcgcgccaacgtccgctgcggccttaatttgcgcgttgtccgcgtcaataaacagcgaaaccaggataccggcatcggcaaggcgtttacaggcgtcgcgcattttgtcgagctggcccgccacgtccagtccaccttcggtggtcacttcctgacgtttttccggtaccaggcagcaaaaatggggctgagtctcacaggcaatcttcagcatctcttccgtcaccgccatctcaaggttcatgcgggtatccagcgtctggcgcaaaatacggacatcgcgatcggtaatatggcgacgatcttcgcgcagatggacggtaataccgtcagcgccggcctgctcggcgataaaggccgcctggaccggatccggataagcggtaccgcgagcgttgcgtaatgtcgcaatgtggtcaatattgacccccaacagtaattcagccatgacaatcctcgttaatcgttatttgttttatcggctcgcgctgcccgcgcgggcaaaaactgacgaaaaagctcgcgacttttaagcggcttcccgcccagatagggcttcagggcgatacgggtgaaacgctttgccgcgcgcagcgcatcgctgtccggaaattcacggctcgccagcgccttaagatggtgcccggtaaaggtgttgttatcaataaccacgctggcgataaagcctttttcttcacggtagcgataggtcattgcgtcgtcaaccgcttctccgctgccggcgcagtgcaggaaatccacgccatatcccagatgccccagcagcgccagttcaaaacgccgtagcgccggttccggcgagccgcttgcgccagccagagactggatacagtgcaaataatcgaagaagagttcggaaaagcgcgtttcgtgctcaagcacgcgagagagaagctcgttgacgtaaaggccgctgtagagcgtgatgccgctgagagggagcgccagcgagacggcttccgcgctgcgcagcgttttgacttcgccgcgcccgccaaagcgaagcagtaagggagtaaaaggctgaagcgcgcctttgaggttagaacgtttggaacgtgcgcctttagccacaaggcgcacgcggccggattcttccgtgaagacgtccagcatcaggctggtttcgctccagggacggctatgcagtacgaaagcgcgttgccagccttccatcatactcgtcgtctttcaagccgcaggtgcgttggctgcgcccaatcaccccagtcacttactgaagtaagctcccggggactcgcggtcttgccgcgtgactcagcctctggcctcgctccttcgcagccagcgcaagcgctgttcaaaacacgttgtgttttgtcctgcacctcgaaagccatagagtatccaaacttagagatcgtcgccgtaaccgagactgcgcagcgcgcgttcgtcatcagcccagccggacttcactttcacccacagctcgaggtgaaccggcgcttcaaacatatcctgcatgtctttacgcgcttcgataccgatggttttgattttggcccctttgttgccaatcaccatcttcttctgcccttcacgctcaaccagaatcagaccgttgatatcgtagccgccgcgctcgttggttacaaaacgttcgatctccacggtaacggaatacggcagttcagcgccgaggaaacgcatcagcttttcacgaatgatctcggaagccataaagcgctgagagcggtcggtgatgtaatcttccgggaagtgatgaatcgcttccggcagatgcttacgcacgataccggcgatggtatcaacgttcagccccgtttccgcggaaatcggcacgatatcaaggaagttcatctggctgccaaggaactgcaggtgcggcagaagatcggctttttcctgtacgttatcgactttgttgaccgccagaatcaccggcgctttaccatcgcgcagcttgttgagcaccatctcgtcgtccggcgtccagcgggtaccttcaacgacgaaaataaccagctcaacgtcgccaatggagctgcttgctgctttgttcatcagacggttaatcgcgcgtttttcttccatatgcaggccgggggtatcgacgtagattgcctgatacggaccttcagtatgaataccaacgatgcggtgacgcgtggtctgcgcttttcgggaagtgatcgagatcttctgcccgagcagcttgttcagcaatgtggatttgcccacgtttggacgaccaacgatggcaataaatccgcagtagttcttttcttcgctcattccagctccagctttttcagcgcctgttcggcggcagcctgctccgccttgcgacggctagaacccgtgccaaccaccggttcactcaggccgctaacctggcagtggatagtaaattcctgatcgtgcgcttcaccgcgaacctgtaccaccaggtaagacggcagcggcagatggcgcccctgcagatactcctgcaagcgcgtcttcggatctttttgcttgtcacccgggctgatttcatccagacgactctggtaccaggagagaataaggcgctcaacgttctgaatatcgctgtcgaggaaaatcccgccgattaacgcttcaacggtgtccgccagtatagattcacggcgaaagcccccgcttttcagttcacccggcccaagacgcagacattcacctaattcgaactcgcgggcgatttctgccagcgtgttgcctcgtaccagggtcgcgcgcatgcggctcatatcgccttcgtctacccgagggaaacgatgatagagcgcgttcgcgatcacaaagctcaatattgagtcgcctaaaaattccaggcgctcattgtgtttgctgctggcactgcggtgagttaatgcctgttgcaacagctcctgatgatgaaaagtgtagcccagcttccgttgaagccgattaattacgatggggttcatgcgttaccaatagatgaatgcgtcaaaaatgcagcacacgaaaccgacctgagtaaaaaccaacgcggtttcgtgtgctgtgtcaatcttacgagagacaacctaaaacttcggggggatattctatacgcaacgacaagggatgtcgttagtttgaatagatttaaattttaaataattcacgctgccgttattgcgtcggcagcgtgaataaagcaggaaagatttactggataccaccgatacgcgataaacgtacgccggtaggccattcgccttcctgtttttcgaaactcatccagattgcggttgctttacccaccagattcgcttccggcacaaagccccaataacggctatcggcgctgttatcgcggttgtcacccatcataaaatactgccccggcgggacaatccaggtcgccagcggcagaccggactgatggtaatacatccccacctggtcctgagcaatcggtacggtcaatatacggtgcgtcacttcgcccagcgtctctttacgttcggccagacggatgccatcggctttcgtctcgcctttcggcagttgccagaaaccgctggtcgcttcgccgccgttgctgcgggagaaggtctgtacgaaatcgctcggctcaacgttggagtaagtgaccggcagcgcgttgccgcaggcctggccagaactacagcccggctggatagtgacctgcttggcaatcggatcgtaagtcactttatcacccggtaaaccgaccgcacgcttgatataatccaggcgcggatcttgcggatatttaaagacgacaatatcgccgcgcttcggatgtccggtttcgatcagcgtcttctggtaaatcggatctttaatgccgtaggcaaacttctcaaccagaataaaatcgccgatcagcagcgtcggcatcatcgagccggaggggatctggaagggctcataaatgaatgagcgaaccaccagcacaatcgccagtaccggaaagattgacgcgccggtttccagccagcccggtttcgggccgacctttttcagcgttttcttgtccaactggtcgccggtcgccgcctgcgcagcggcctgactttcgcgacgttttggcgcaaagataaacttatccaggcaccacaacagacccgtcaccacagtagcgatgaccaggatcagggcaaacatgttcgccatgccaactccttagggttatttgccgtctttaccaacgtgcagaatggcgaggaacgcttcctgcggaagctcaacgttaccgacctgcttcatgcgtttcttaccgtctttctgcttctgcagcagctttttcttacggctgacgtcgccgccatagcatttcgccaggacgtttttacgcagctgttttacggtagagcgggcaatgatgtggttgccgatggcagcctggatagcgatatcgaactgctgacgcgggatcagctctttcatcttctctaccagttcgcggccgcggtatggcgcattgtcgttatgcgtgatcagcgccagcgcatccacacgctcgccgttaatcaacacatccacacgcaccatgttggaagcctggaagcgcttgaagttgtagtccagcgacgcatagccgcgggaggtagacttcagtcggtcgaagaagtcgagcaccacttccgccatcgggatttcataggtcagcgcaacctgattgccgtggtaaaccatgttggtctgtacgccgcgcttttcgatacacagggtgatgacgttgcccaaaaactcctgcggcagcagcatgtgacactccgcgatcggctcgcgcagctcctgaatattgttcagcggcggcagcttcgacgggctgtcgacgtagataacctctttcgaggtggtttcgacttcatagactaccgtcggcgccgtggtgatcagatccagatcgtattcacgctccaggcgctcctggatgatctccatatgcagaagacccaggaagccgcagcggaaaccgaagcccagcgccgtagagctttccggttcatagaacagagaagcatcgttgaggctcagtttgcccagtgcgtcgcggaagttttcataatcatcggagctgaccgggaacaggccggcatagacctgcggtttcacctttttaaagccgggcagcgctttatctgccgggttgcgcgcaagcgtcagcgtatcgccgaccggcgcgccaaggatgtctttaatggcgcaaaccagccagcctacctcgccgcatttcagctcggtacggtccacctgcttcggcgtgaagatgcccaggcgatcggcgttatacacctgcccggtactcatcaccttaattttatcgcctttgcgcatggtaccgtttttgatacgcaccagagaaacgacgccgaggtagttatcaaaccaggagtcgataatcagagcctgcagcggcgcttccggatcgccttccggcggcggaatatcgcgcaccaggcgctccagcacgtccggtacgccaacgccggtcttcgctgaacagcgcaccgcatcggtggcatcaataccaacgatgtcttcaatctcttccgctacgcgttccggatcggctgcgggcaggtcaattttgttcaggaccggtacgacttcaaggtccatttccatcgccgtatagcagttagccagcgtctgggcttcgacgccctggccggcatcaaccaccagcaaagcgccttcacaggcggcaagcgaacgagaaacttcataagagaagtcgacgtggccgggggtgtcgataaagttcagctgataggtttcgccatcagttgctttgtaatccagggtgacgctctgcgccttgatagtgataccgcgctcacgttcaagatccatggagtccagaacctgggctgccatttcacgatcggaaaggccaccgcaaatctggataatacggtcagacaatgtcgacttaccgtggtcgatgtgagcgatgattgaaaagttacgtatattcttcatatttagagttaattatgccttacgcgaatcatgaggccgctgttctgtgcctgacgttttttaatccgaaaacgccgcattctacactacatccacgaaaccaggaaatgctcttaccgctagcataaccggagtaaatgatgagttcctgcgggagttgtaaataaagataagggccagtgaaatcactgacccagttgggaggaaggcgtctcgatgcggactaaatctggcggtaaaccgacgctgataataaccggctgccacgactgccgggaggctaagccaggcgaaagaccgcgagcgaccagaaacccgccaacgccgcccaaaatggccccgcaaagcgaggcaaagtcgttggcaaacagcacctggaatattgatgccatcacaaacaaaccgactaacggcgccatataaaccaataccgccgacccgagcaggctgctttcggcaatgcccagttcgactttttgcccggccgacagcggctgttcgcaggggacgctaagggtatggctggtttgcggcccaagcttattcagcacccggcttccgcaaccggcgcgagaagcacagctgctgcaggaggctttcacatcgcagtgcaccagcgcaacgccattttgccaggaaacgaccgtcgcccactctttaatcattgtactgccctgaatttaatactatcggaaatacgcttcgccgtttgcggcggcagctcgccaacgatggttatctctgcgttatcacgcacggtagtcgccacggtacgacggccggtacgcagcagctgatcgctgctatttgccgtggcgcgattgatattgacagagaaactaaacagcccgtcggaatacaaacgggactctaccgggccatcgaaagtgggcagacgacgctggctgctggagacttcggccacgccctgcggcagccaggttggcgcccagttaaagttggccttatttcccccttccggcaccgacagctgcggaggcaggttggccttagacagggtttccatactggcgctaacgttatcgccaacgttgaacgagacgacgcggaactgctcaagcgtttcgccgtcgcgatcaagcagatcaacgcgcagaggcagcttagtttcagcatctaaccatgcgatatagctatagcgggtgccatcgcgagccacgacgcgcacaacatcgcataaacgatcggcaatacgcgtccgccccacggaaatgaagtcgtaataggatgacagacgtttaaagtcggagtagaccaatgaaggcagcgaatcaacgatatagtcgccgttcagggtgaaaggatcgagtccgggctcaaaatagctgatttccgttccgcgcagcaccacctcccgacgcggcccgtcaagctggagcagctgtgccagggtgcgattgtttagtttagcgtgtcgataacgcagcgactcaacaccctgcttgttgatgctgacgaaagagagctcgtaattaagggactggctggccaggttcatctgctgcaacaacgccccggacgatgtatcagccgaggcgttgacggagaagaacaggctgcctgccatgagcgacatggcacaccaaagttgcttcattactgcgattgtgttcctaaagtttgatagcccggcacctgaacagcggcttgctgagtctgggcctggccaaactgaagctgttccgcatgcaggcgacgctgcaattcatagtcctgcagcatagcattaattctgcggcgctgttcctgcacctgagcctgctgaccgctacctgccgaagcatccgccggcacgcccaggctgaccgggctggccttacccatcatcggcatggtgttaaacaccggcgcctctggctgctgggatgaatcagactggccattatactgctgaacgccgacaatcacagcaagggatacgcacgcggcaacgcccatctgggtaagcgagctggcccacgggcgtactttttgccagaaaggcatctgacgccactggtgcggtgcgggctgagattcaggaattagaggaaccgtctgacgaacgggctcgttttcaatggcggccatgacgcgagctgagatatcaaaatggagcacctcactcgtatcgcctcgcagcgtatcgcggatgagatggtagctctcccaggttttttgcatttcagatgaacgctccagctcgttgagcagttcgttatccagcgtttcaccatccattaaggccgaaagtttttctttctgcatgcctgatacccttttccagtattccgctatcgtcaacgcctgattagcggttgaactttattatcaatagcttctcgcgcccggaagatgcgcgaacgcactgtgcccaccggacaatccatgatggcggctatttcttcatagctcatgccatccagctcccgcaaggtaattgccatgcgtaaatcttccggaagcgattcaatggtacgaaaaactatttgtctcagctcttctgacaacattaagttctcagggttcgaaatttctttcaatgccccgccactttcgaagttttcagcatcattcgcatcaacatcgctggatggcggacggcgtccctgagcaaccagataattcttcgccgtgtttacggcgatgcgatataaccaggtgtaaaaagcgctatccccccggaaagaatccagcgcacgccatgctttaacgaacgattcctgaacaacgtcagcgatatcgcccggcggcacgtagcgggagaccagacttgcaaccttatgctgatagcgcaccaccagcaggttaaatgctttctgatctcctttctggacccgttcaacgaggacctgatccgttaactgctcgctcatccgaggtaatgtctccccaaacccaattcccatgcgtattcaaaaacaccacccaattactgcatcaagtgagcaagcagagggttggagtgtctgaaaacaataaagttccgttacgcctttgtttttcgtccggcaccggctgacggattgttatctctcattatatgtcccggtcgctaaacgatatgtaagataataagaaaaagcgcaagacccgccagaagggtaacgtaacccggcttttatttcactataaaatctgaagctcacgagccgcttcgcaaaaccttttttccatttacagcccgcctcattacgccgttatgtttagtcctcacaacgcggagtaaaaaaaatgtacgatttctcgctggctggtgctattgttcgcttattgtgtttagtaaattaaacaaaggccatgaaaacaacttccgattcctcctgtgatgtgctgattattggcagcggcgctgccggattatcccttgccttacgcctggcggaacgctgcgcggtcacggttctcagcaaaggccctatcagtgaaggttctactttctacgctcagggcggtattgccgccgtatttgatgaaaccgatagcgttgaatcgcacatcgaggatacgttgatagccggagcgggtctttgcgatcgccatgcggtctcattcgtggcgagcaacgctaaaccctgcgttcagtggctaatcgatcagggcgtgctgtttgatactcaggttcaggcgaacggcgaagagagctaccatctgacccgcgagggaggtcacagccaccgcagaattctccacgccgccgatgcgaccggtaaagccgttgagactaccctggtgagccaggcgctggcccaccctaatatccgcatactggaacgcagtaacgccgttgaccttattatctccgataaaatcggcctgcccggcacgcgccgggtggtgggcgcgtggatctggaatcgtaataaagaagcggttgaaacctgtagcgcaaaggccgtggtgctggctaccggcggcgcggctaaagtttatcaatatacgacgaatcctgacgtctcttccggcgatggtatcgcgatggcctggcgtgccggctgccgggtcgccaacctcgaatttaatcagttccacccaaccgcgctgtaccatccgcaagcgcgcaacttcctgctgacggaagcgctgcgcggcgagggcgcgctgttgaaacgccctgacggcacgcggtttatgccggactttgacgagcgcggcgagctggctccgcgcgatatcgtcgccagagccatcgatcatgagatgaagcgccttggcgctgactgcatgtatctggatatcagccataaaccggcagaatttattcgccaccacttcccgatgatctacgagaagctgctggggctgggcatcgatctgacaaaagaagcggtgcccgtggttcctgccgcacactacacctgcggcggcgtcatggttgacgatcacgggcgcaccgacgtcgacgggctgtatgccatcggtgaagtaagctataccggattacacggcgctaaccggatggcatcaaactcgttgcttgagtgcctcgtctacgggtggtccgccgccgaagatatcgttaagcgtctgccgttcgcgcaggcagtcaatgaactgccatcatgggacgaaagccaggttgaaatacctgatgaactggtcgtgattcagcacaactggcatgagctgcgcttgctgatgtgggattatgtcggcatcgtgcgcaccacccgccgtcttgagcgcgccctgcgccgcattactatgctgcagcaggagctggacgaatactacgcccgcttccgcgtctccaataatttactggagctgcggaacctggtgcaggttgccgagctgattgtgcgctgcgccatgctgcgtaaagagagccgcgggcttcactacacgctggactatcctgaccagttgccggagagcgggccgtcggtgctctcgccgttggctcacataaaaagataaaagtcctgggtcagagcggtaaatccttcggaatactgctgctctggcccacggatgatcaatctgtcgctaaagcactcctcccccgccgtcggcgaaaaagccaacagaacccgatgcggcgggcgcacttccgtttccgccacgtcggtacgcagacgcagatgccagcccatattctgcgcccgctgcacaaaggcgttaccaatgtcgaccggaagcacgacgcagaaaaacccctcctccgtaataagctcggcggcgcaggttaataatgttgcgtgatcgagggaggaggtatagcgagcctgctcgcgctgcgaggtggcgcaaggtacgccttcagcgaaaaaaggcggattgctgacaatcagctcatagcggcgggtttgctgcggctgccattgctgaatatccgcctgatgaatctgcaggcgatcggcccagggagaatccgcggcgttttctcgcgcctgttctgccgcctcttcatccagctccacggcatccacaatcaccgtctcgccggttcgctgcgcgagcatcagcgctaacagaccgctgcccgcgccgatatccagcacgcgcttaacctgagcgatgggggcccatgcgccgagtaaaatgccgtcggtacccactttcatcgcacagcgatcgtgggcgacaaaaaactgcttaaacgtaaaaccattgcgcggcagcgcgaacttcgactgggacatcctcgataaccttgcgggcaaaaaactcctgagcttaaggctatgcacaataccggagaacagatagccttacaaacagatgaacattgcgtccgtaacgtctataatcggcggtccactcagaggtagatcatgactgtaacgactttttccgaacttgaactcgacgaaaacctgctggacgccctccaggataaaggtttcacacgcccgacagccattcaggccgccgctattccgcctgcgcttgatggccgtgatattctcggttcagccccgaccggcaccggtaaaacggcggcgtatctcctgccagcgttgcagcatctgctcgattttccgcgcaagaagtctggtccgccgcgcattcttatcctgacccccacgcgcgaactggcgatgcaggttgccgaccatgcgcgtgagctggcaaaacatactcatctggatatcgccacgatcaccggcggtgtcgcctatatgaaccatgccgaagtgttcagcgagaaccaggacatcgtggtcgccacgaccggtcgcctgctgcaatatattaaagaagaaaactttgattgccgcgccgttgaaacgctgatccttgatgaagcggaccgcatgctggacatgggcttcgcgcaggatatcgaacacattgccggtgaaacccgctggcgtaagcagaccatgctgttctccgccaccctcgaaggtgacgccattaaagattttgctgagcgtctgctggaagaaccggtggaagtctctgcgactccctccacccgcgagcgtaaaaagattcaccagtggtattaccgcgccgatgacgtcaagcataagaccgcgctgctggtccatctgctaaagcagccggaagcgacgcgttctatcgtcttcgtccgtaagcgcgagcgcgtgcatgagctggcgggctggctgcgtgaagcgggtatcaacacctgctggctggaaggcgagatggtacaggcaaaacgtaatgaagcgattagccgcctgaccgatggccgtattaacgtgttaatcgccaccgacgttgccgcgcgcgggatcgacatcgcggacgtcagtcacgttttcaacttcgacttgccgcgcacggccgacatctatctgcaccgtatcggtcgtaccggacgcgcgggtaaaaagggaacggccatctctctggtcgaagcccacgaccatctgctgctgggtaaaattggccgctatattgaagagccgttaaaagcccgcgtcatcgatgaactgcgcccgaccactcgcgcacccagcgagaagcaaaccggtaaaccttccaagaaggttttagccaagcgtgcagagaagaaagagaaagaaaaagagaaaccgcgcgtgaaaaaaacgccatcgcgataccaaaaacattggtaagcgtcgtaaaccaagcgcagcggatgctccgcagaagtcaaacgaagagtaaaaaaaacgccgggatatcccggcgttttcacattaaaacggaatcttacaggctttcagtaaaagtacgggcgataacgtcgcgctgctgttccggagtcagagagttaaagcgtaccgcatagccagacacgcgaatggtcagctgcgggtatttttccggatgttcaaccgcgtccagcagagtttcgcgacgcagcacgttaacgttcaggtgctgaccgccttcaacgcggacttcaggcttcacgtctaccgggatttcacggtattcgatttcacccagattgctcactgcaaccacgtcatcttcagcaaaaccggctttcgcgcacaggcagcgggcttcgcctttttcgctatccagcagccagaaagagttcagcaggtcgtcgtttgcagctttagtaatttggataccagtaatcattttatgcctcccaggcagggtttgttcgattattggccttcgcggccaattggtaaaaccattgttctatgagtgtatatatatcagccgtacacccggcattctttgatttaaatcaacaaaaaccacatcacaaaagtggtcataggcggatattattgttttacatcaagttacgccatgccacctaccaaataaatttgtaagttttcaattttttttgcataaagagcgtcaatcgcgtggggcaaattttgtgatgttgaaagatgcagttaagctatggcaatgacactttgcaggagagcaaaatgaccgccccattaacctggcatgacgtgctggcagaagagaagcagcaaccctattttgttaataccctgaaaaccgttgctgacgagcggcaatcgggaatcaccatctatcccccgcaaaaagatgtctttaacgcgtttcgttatactgagctaagcgacgttaaagtggtgattctcggccaggatccttaccatggaccagggcaggcgcacggcctcgccttctcggttctaccgggcattcagatcccgccatcgctgctgaatatgtacaaggaactggaagggacgataccaggctttcagcgcccgactcacggttatctcgaaagctgggcgcgccagggcgtgttgctgctcaataccgtattaacggtacgtgccggacaagcgcactctcacgccagcctcggttgggaaacttttaccgataaagtcatttcgctgattaaccagcatcgggaaggcgtcgtctttctgctgtggggttcgcatgcgcagaagaaaggcgcgataatcgatcgccagcgccactgcgtgctcaaagcgccgcacccgtcgcccctctccgcccaccgcgggttctttggcagtaatcatttcgtgcaggcgaatcagtggctgaccgaacgcggcgaagcgcccattgactggctgcccaggctaccggctgaaagcgaatagctctgaaaatgaaaatgccagcattacgctggcattttgactctgagacaaggtgttacgccttgttctgccgccaccattcagccagcagcacgccggttgctacggacacgttcaggctttcaacgttgccggtgccttcaatcgcgatgttcagatcggcgctggagatagcggcgtcagaaagaccgtcactctcctgccctaacaccagcaccattttcttcggcagctcggctttgaacagcggagtcccgttatggctggaagtagaaacaatcgcgtagcccgctttacggaagcgctcgagcgtatcgatgaagctgtcgcccgtaatcggctcaacgtgctccgcgccgccttccgcagtacgaatcgcggcgccggactccataacgccggcatcctgcacaatcacgcctttgacgccaaagtgcgcacagctgcgcataatcgcgccgaggttatgcgggttgccgacatcttccagcgccagaacacaatcttcagcgtcggatttagccacccactgctcaacggaagtgccgtggcgctttttaatcaggaagcaaaccccgccgtggtgttcagtgccggacgctttcgccagctctgcttcatcgaccacgtgataggctttacgattcgccgccatccagcgtagagcttctttgaagcgcggggtcacgctctggataaaccaggcgcgaacgatagcgtccggacggctctggaacagcgcctggcaggcgttttcaccataaacgcgggtttcttccgcgcgctggcggcgcagtacttcaggatcgataaagctttttccgctgatcccgccgtgatccgcttttaccggcgcctcatcgcccggcgcgcgggatacggtacgccacggagaggagccctcgccgccaaagccttcacgcttgcgatcgtcacgtctacgatcgccaccgcggctctctttttcatcgcgcgcagggcggttacgaccgtcaacacgagactttcctggacgtcccccgcccttcccggtacgcgggttatgggtacgtcggtcagaatcatcatcactgcggacatacatcactttgaccttgccgcttttatttttcagttcgtcgtcgctcattcattttctccacctgcgctgcgcgaagcgcgcagattacccgatgtgccatcacttagccattatttcatttaaaagcctgagtctatcgtattcattgaataaaactcattgtcctttattcgcagtgcatcgataatatgtaacattacagaaacaaatcggccacgtgccgcgctgcaacccataaccagaggttagttatgaataccgtttgtgccagttgtcaggctctgaaccgcatccccgacgatcgtagcgccgatggcgcgaaatgcgggcgctgcggtcacgatctttttgatggcgatgtgatcaacgcgaccggggtaacgctggataaactgctgaaggacgatctgcccgtggttgttgatttctgggcgccgtggtgtggcccctgccgtaactttgcgccaatctttgaagatgtggctgaagaacgcagcggcgaaatgcgtttcgtgaaagtgaataccgaaatggagcgtgaactgagcgctcgcttccgcattcgcagcatcccgaccattatgatgtttaaaaatggcgaagttatcgacatgctcaatggcgccgtacctaaagcacctttcgatagctggctaaacgaagcaggccagcagtaaacctcacggggcaccgcttgtgccccgttttctcctctgcgacaatggcgttttttcttagcgatccccatgactgataacgccgtccttcgccttcgcgccgaacgcctcgcgcgcgccacccggccttttcttgctcgcggcaaccgtatccaccgctgccagcgttgcttgctgccgttgaagcagtgcctttgcgccaccctcaagccggctgccgccgccagccgtttttgcctggtgatgttcgataccgagccaatgaagcccagcaataccggccgcctgattgccgatatcctgccggatacggaggcctttcagtggtcacgaaccgaaccgccgcaggcgcttctcgatctcgtcgccgacgcgcaatatcagccgatagtggtttttcctgcctcttatgctggcccagagcgtcaggttcttgattccccgctcccgggtaaaccaccgctgtttatcatgctcgacggcacctggcccgaagcgcgaaaaatgttccgcaaaagcccctggcttgacgcgctgccgatgatttccgtcgatctgtcgcgtatctccgcttatcacctgcgggaagctcacgcagaaggccaatactgtactgccgaagtcgcgattgcgctgctggatctcgcgggagataaaagcgcagccacggcccttggcgagcacttcagcttattcagaacgcgctacctggcaggaaaaactcagcataagggtagtatcacagcacaactgacagaaaacgtttaaaatcattcggtcactggggatcaaaggagaccggtatgagccaacgaggcctggaagcattgctgcggccaaagtcgatcgccgttattggcgcatcaatgaaaccacagcgcgccggttatctgatgatgcgcaacctgctggcgggcggatttagcggccccgttctccccgtaacgccagcgtggaaagcggttcagggcgtactggcctggcctgacgtcgacagtctgcccttcacgcccgatctcgccgtgctttgtactaacgcccgccgaaatcttgagctgctggaagcgctggggcaaaaagggtgcaaaacctgcatcattctctcctccatccccgaacagtatcccgcgctgcttgaatgcgcctcccgctaccagatgcgtctgctcggccctaacagccttggcctgcttgcgccgtggcagggcctcaacgccagcttttcgccggtgcctattcatcgcggcaaactggcgtttatttcgcaatcggcggcggtctccaataccatcctcgactgggcccagcagcgcgagatgggtttttcttactttattgcgctgggggatagtctggacatcgacgttgatgacctgcttgatttcctcgctcgcgatagtaaaaccagcgccattttgctttatctcgaacacctcagcgatgcccgtcgttttgtctcagcggcccgtagcgcatcgcgtaataagccgattctggtgattaaaagcggacgcagtccggctgcgcagaagcttctgcacgtcaactctggcatggatccggcctgggacgccgctattcagcgcgcaggtttattgcgcgtacaggacacgcacgagctgttctcagcggtcgaaaccctcagccacatgcgcccgctgcgcggcgagaaactgatgataatcagcaacggcgccgctccggctgcgctggcgctggatgagctctggctgcgtaacggcaaactcgccgcgctcagcgaagagaccagcagcgctctccgtcaggcattacctgaaaccatcgatatcgccaacccgctggatctccgcgatgacgccagcagcgagcattacctcaaagcgttgaacgtactgctggatagccatgactacgatgcgctgctggtgatccactctcccagcgctgccgcaccgggaacagagagcgcgctggcgttgattgacgccctgaagcgccacccgcgcggcaaatacgttacggttcttaccaactggtgcggtgagttctcttcacaagaagcccggcgcctgtttagcgatgcggggctgccgacctatcgaacgcctgaaggaaccattaccgcttttatgcacatggtggagtaccggcgtaaccagaaacagctcagggaaaccccggtcctgtcagattcgttaaccactaacgctgccgaagcgcacaacctgctgcaacgggcaatgaatgaaggcgcaacgtcgctggatacccatgaagtgagccccgttctgcacgcttacggtattcataccctgccgacgtggattgccgccgatagcgccgaggctgtacatattgccgagcagattggctaccccgtcgctctgaagctgcgctcgcctgatattccgcacaagtcggaagttcagggggttatgctttatctgcgcacggctacagaggtacagcaggccgcggacgcgattatcgatcgcgtcaaaatgacctggcctcaggcgcgtattcacgggctgctggtgcaaagcatggctaatcgcgccggggcgcaggagctgcgggttgtcgttgagcacgatccggtttttgggccgctgatcatgctgggagaaggcggcgtcgaatggcgggctgaggatcaggccgccgtcgcgctcccgccgctgaatatgaaccttgcgcgctatctggttatccaggccatcaaaagtaaaaaagtgcgcggccgcagcgcgctgcgccctctcgatattcctggcctgagccagcttctggtacaggtatcgaatctgatcgtcgactgtccggaaatacagcgcctggatattcaccctcttctggcttccggccacgagtttaccgcgcttgatgtcacgttaactctcgcaccgtttaccggcgatagtgaaagtcgcctggccatacgcccttaccctcagcagcaggaggagtgggtggtgatgaagaatggcgaacgctgtcttttccgtcccatcctcccggaagatgagccgcagcttatggcctttatcgctcaggtcacgaaagaagatctttattatcgttacttcagcgaaatcaacgaatttactcatgatgatttagccaatatgacgcagatcgactacgatcgagaaatggcctttgttgctgtgcgcaccaccgccgaggggaacgagatcctcggcgtaacgcgagcgatctccgatccggataatatcgatgccgagtttgctgtactggtgcgctccgacctgaagggtatggggttaggccgcaagctcctggaaaagctgattatctacacgcaaaaccacggcctgcagcgtttgaatggcattaccatgccgaataataaaggcatgatcggactcgccagaaagctaggattctcggttgatattcagcttgaagatggaattgtcagtttgtctctacagcttgtacctgagcaattacaaacggctggccgcaattgttgactactttaacgggtagtaatggtattattgcccgcttacgtcgtctgcatggtacagaagacccttcaataaacagagaagaaacgcactgtgatgttgtcaaaatttaaacgcaataaacatcaacaacaccttgcccaactccctaagctttctcagtcagttgatgatatcgagttcttttacgctccggcagattttcggcaagcgttactggccaggatagctcaagccacccagcgtatttgtatcattgcgctttatctggaacaggatgatggcggcaaaggaattttgcaggcgctctatgacgctaagcgtcagcgtcccgaattagatgttcaggtgttggtcgactggcatcgcgcccagcgcgggcgtattggcgtcgcggcgtcaaacaccaatgccgactggtactgccgcatggcgcaggaaaatcccggtgtcgatatcccggtttatggcgttccggtcaatacccgggaagcgctcggcgtcctccacttcaaaggttttatcattgatgacagcgttctctacagcggcgccagtctgaatgatgtttacctgcatcaacacgataagtatcgctacgaccgctaccagtgcattcgcaacggtaaaatggctgatgtgatgttcgactgggttgagaataacctggtgcaagggcgtggcgttaaccgccttgacagggccgatcggccaaaaagtccggaaatcaaaaatgacatccgccagtatcgccaggagctccgcgatagcagctatcattttatcggcaatgctgacgatgaccagctgtcggtcactccgttagtgggcctcgggaagacgagtctgctgaataaaaccatttttcatttgatgccctgcgctgagcataagctgactatctgcaccccctatttcaacctgcccgctctgctggtacgtaatatcatccagctgctgcgtagcgggaagaaagtcgaaattatcgttggtgataaaaccgctaatgatttctatattccggaagatcagccgtttaaaattatcggagcgctgccctatctttacgaaatcaatctgcgacgcttcctgagccgactgcagtattatgtcaataccgatcagctgattgtccgtttatggaaggacgacgataacagctaccacctgaaaggcatgtgggttgatgacgaatggatgctgctgaccggcaataacctgaacccgcgcgcatggcggctggatttggaaaacgcgatacttatccacgatccaaaacaccagctcggcgcaatgcgtgaaaaagagctcaatctcatccgcaaacatactacgatcgttcagcactatcgcgatctacaaagtattgccgattacccgataaaggtacgcaaactgatcaggcgtctgcgacgtatccgaatcgaccgccttatcagccgtattctctgaattcacgccccgccctgcggggctttttctggaattagtatgcgcgtcatcatgcttattgccccactattattactgactggctgcagccatatggctaatgattcatggagcggccaggataaagcccaacacttcctcgcctcagccatgctttccgccgcaggcaacgaatatgcccagcatcagggctatagccgcgaccggagtgccgctataggctttatgttttccgtgagcttaggggcatcgaaggagctatgggacagccgcccgtcagggagcggctggagctggaaagattttgcctgggatgtggcaggtgccactaccggctatgcggtatggcagctggcacatcagtaatgctacaaacgtagccccttgcctttacgatgcagcgtcagggagaccaggaaggcaatcgcgcccatgacggtcacgtaccagtaaaaggcgtgctcaattcccgctgattttagcgacagcgcgacatactctgccgagccgccaaatagcgcattggccaccgcataagagagtccaacccccagggcacgaacctgagccggaaacatttcggccttcagaatgccgctgattgaggtatagaagcttactatcaacagggcgcatatcactaaagcaaatgccgcatacggtgaactcacgttctgtaatgcattgagaatcgggacagtgaagacggtgacgagtacgccaaaacagagcattgaggtccggcggccaatcttatccgaaagcgcgccgaaaagcggctgaacaagcatataaacaaataaggcagcggtcataatcatgctggcggtacccgcgctcatgcctgcggtgttgaccagatatttctgcatataggttgtaaaggtataaaagcttaacgaccctgcggcagtgaatccgagcaccatgataaatgccttacggttacgccataatcctttaaacgatcccgcttcttttaacgcgcgcgtttcctgttgagacgtttcgtccagctgtcgtctcagccacagggcaacaatagccaggactgcgccaagagcaaacgggatacgccatccccaggcatgaagctcttcatcgctgaggatctgctgcaaggcaaccacaacaagcacggccagaagttgcccaccaatcagcgtgacgtattgaaatgaggcatagaaacctttctttccttccaccgcgacttcgctcatataggtcgcgctggtaccgtattctccgccaacggacaggccctggaacaggcgtgcaagtagcagcagagccggggcccaggtccctatcgttgcataacccggcaggcaggcaatcaccagtgaaccaaaacacatcatgcatacggagataagcatagaggttttacgtccacgacgatcggcaatgcgcccgaatatccatcccccgatcggacgcatcagaaaacccgccgcaaatacccctgcagtttgtaacaattgcgtagtggtgttgccagaaggaaagaagatgtgcgcaaagtagagtgagcaaaatgaatagacgtagaaatcaaaccattccaccaaattccctgatgacgcccccacaattgcccatatacggcgccgggtatcaccctgatcctgggatccgcgttcgctaatactgctttctgtcattgtaattctgctccagcaaagactgcaatctgccgcgtcgggtgaccccgctcaatcagacaaatcgattagtaaattaaatgttatataattgttattttttagtttgtgatgccattcacattttttttcgtactgcaggttttcgcgattaaaaggagattcttcaggattagcaaagtgaaatatggtgaatagcgggccagaacaggtttttatacaggcgatattgcggcacaaatttatgtggggcgggaagatcgatgctgaaaattatccccaatgagcctgatgtttcttttttcgctggagataatcttcatcctgacgaagcttatcccaccattgtttgaaaactgccgcagctgccgccttaacaggatcattacctcgcgaattcaggtgcccctccttcgcgtattttttaccgcctttgtaattggcataacgccttgcccgggtgtagcccatctgaataaatttgcgcgccatatccataccgacaaaatcattctgctgtcgatagaactcgaagagctgataaattttcctcgcagattcaatcgccgatgcttcatctttatagcgccagtagggaagaatttcgcttttatagggttcaaccaacaacacgccctgttcacctcttcctacctgataaaactccggatgctggcgaaaatcgatgctggaaaagtcttgctggtaattaaaaggcttaatggccattattttctcacgggctggctgatacacgttataagcctggtacataagactgaagtgtggctagtggaatcttctgtatatttatacagagagcccgcataaaaccggcaggttattatt
